(19) United States
(12) Patent Application Publication
(10) Pub. No.: US 2026/0176626 A1
(43) Pub. Date: Jun. 25, 2026

(54) Compositions And Methods For Transcription Factor 4 (TCF4) Repeat Expansion Excision

(71) Applicant: EmendoBio Inc., Wilmington, DE (US)

(72) Inventor: Rafi EMMANUEL, Ramla (IL)

(21) Appl. No.: 19/126,913

(22) PCT Filed: Nov. 2, 2023
(86) PCT No.: PCT/US2023/078551

§ 371 Date: May 2, 2025

Related U.S. Application Data
(60) Provisional application No. 63/382,108, filed on Nov. 2, 2022.
(60) Provisional application No. 63/482,870, filed on Feb. 2, 2023.

(51) Int. Cl. C12N 15/113; C12N 15/85

(52) U.S. Cl. CPC C12N 15/113; C12N 15/85

(57) ABSTRACT

RNA molecules comprising a guide sequence portion having 17-50 contiguous nucleotides containing nucleotides in the sequence set forth in any one of SEQ ID NOs: 1-2325 and compositions, methods, and uses thereof.

[0001] This application claims the benefit of U.S. Provisional Application No. 63/482,870, filed Feb. 2, 2023, and U.S. Provisional Application No. 63/382,108, filed Nov. 2, 2022, the contents of each of which is hereby incorporated by reference.

[0002] Throughout this application, various publications are referenced, including referenced in parenthesis. The disclosures of all publications mentioned in this application in their entireties are hereby incorporated by reference into this application in order to provide additional description of the art to which this invention pertains and of the features in the art which can be employed with this invention.

### REFERENCE TO SEQUENCE LISTING

[0003] This application incorporates-by-reference nucleotide sequences which are present in the file named “231102_92056-A-PCT_Sequence_Listing_AWG.xml”, which is 2,044 kilobytes in size, and which was created on Nov. 2, 2023 in the IBM-PC machine format, having an operating system compatibility with MS-Windows, which is contained in the XML file filed Nov. 2, 2023 as part of this application.

### BACKGROUND OF INVENTION

[0004] The Transcription factor 4 (TCF4) gene (also called ITF2 and SEF-2) is located on chromosome 18 and consists of 20 exons. Exons 1 and 20 are noncoding exons, with the other exons coding for a basic helix-loop-helix (bHLH) protein that functions as a homodimer or as a heterodimer with other bHLH proteins. These dimers bind DNA at Ephrussi (E) box sequences.

[0005] TCF4 has been reported to be expressed in the developing corneal endothelium. It plays a pivotal effector role in the Wnt signaling pathway. Expression of TCF4 is a key factor in controlling the balance between proliferation and differentiation. Wnt/TCF4 signaling has been reported to regulate human corneal endothelial cells (hCECs).

[0006] An intronic trinucleotide CTG repeat expansion of TCF4 may account for 50-70% of cases of Fuchs Endothelial Corneal Dystrophy (FECD), which a degenerative disease affecting corneal endothelial cell monolayer Expression of the repeat expansion leads to RNA toxicity and abnormal TCF4 expression through mis-splicing. Most subjects without FECD have between 12 and 40 repeats of a CTG sequence in the third intron of TCF4. In 77.7% of FECD cases in the United States, the CTG repeat sequence measured in peripheral blood leukocytes contains 50 to 3000 repeats.

[0007] FECD Is characterized by focal outgrowths and loss of endothelial cells and edema. Because human corneal endothelial cells (hCECs) have minimal regenerative capacity in vivo, reduced hCEC density results in severe cornea damage and loss of vision in advanced FECD cases. Currently the only treatment option is corneal transplantation.

### SUMMARY OF THE INVENTION

[0008] According to embodiments of the present invention, there is provided a method of excising an intronic trinucleotide CTG repeat expansion from a Transcription Factor 4 (TCF4) allele in a cell, the method comprising
[0009] introducing to the cell a composition comprising:
   [0010] at least one CRISPR nuclease, or a nucleotide molecule encoding a CRISPR nuclease; and
   [0011] a first RNA molecule comprising a first guide sequence portion, or a nucleotide molecule encoding the first RNA molecule; and
   [0012] a second RNA molecule comprising a second guide sequence portion, or a nucleotide molecule encoding the second RNA molecule,
[0013] wherein a complex of the CRISPR nuclease and the first RNA molecule affects a double strand break upstream of the intronic trinucleotide CTG repeat expansion and a complex of the CRISPR nuclease and the second RNA molecule affects a double strand break downstream of the intronic trinucleotide CTG repeat expansion,
[0014] wherein the first guide sequence portion comprises 17-50 contiguous nucleotides containing nucleotides in the sequence set forth in any one of SEQ ID NOs: 1216-2325 and the second guide sequence portion comprises 17-50 contiguous nucleotides containing nucleotides in the sequence set forth in any one of SEQ ID NOs: 1-1215.

[0015] According to embodiments of the present invention, there is also provided a composition comprising an RNA molecule comprising a guide sequence portion having 17-50 contiguous nucleotides containing nucleotides in the sequence set forth in any one of SEQ ID NOs: 1-2325.

[0016] According to some embodiments of the present invention, there is also provided a method of treating Fuchs Endothelial Corneal Dystrophy (FECD) in a human subject, the method comprising delivering the any one of the compositions described herein to the subject, or transplanting the any one of the modified cells described herein to a cornea of the human subject.

### BRIEF DESCRIPTION OF THE DRAWINGS

[0017] FIG. 1: Schematic representation of Intron 3 of the TCF4 gene. Additionally, a summary table of the depicted TCF4 guides is shown below:

| Name | Guide Sequence Portion |
|---|---|
| hTCF4_g1_20 bp_II | CUCUUCUUCGACGUAUCUAG (SEQ ID NO: 178) |
| hTCF4_g2_20 bp_II | CAGGCAAAUCCUAUACGAGA (SEQ ID NO: 405) |
| hTCF4_g3_20 bp_II | GCAUUUAUUUCGACCCUAAU (SEQ ID NO: 238) |
| hTCF4_g4_20 bp_II | UCCAAAAGAAGGUCUAGAAG (SEQ ID NO: 308) |
| hTCF4_g5_20 bp_II | UGGAGUUUUACGGCUGUACU (SEQ ID NO: 1541) |
| hTCF4_g6_20 bp_II | GCCCCACUUGGAAGGCGGUU (SEQ ID NO: 1436) |
| hTCF4_g7_20 bp_II | UAACUAGGAGGUAAGAUGUA (SEQ ID NO: 1216) |
| hTCF4_g8_20 bp_II | UUGGUAAAUUUCGUAGUCGU (SEQ ID NO: 1575) |

[0018] FIG. 2: Activity of sgRNAs targeting Intron 3 of TCF4. RNPs comprised of SpCas9 protein and synthetic RNA guides were electroporated into U2OS cells. Cells were harvested 72 hours post DNA transfection, genomic DNA was extracted, and the TCF4 region targeted by the guide was amplified and analyzed by next-generation sequencing (NGS). The graph represents the % editing±STDV from two independent electroporations introducing the RNPs.

[0019] FIG. 3: mRNA levels of TCF4 measured by qRT-PCR. U2OS cells were electroporated with the indicated RNP combinations, RNA was extracted seven (7) days after electroporation, and cDNA was prepared. qRT-PCR was performed with fast SYBR using specific primers for exon 11-exon 12 junction of TCF4 gene. Results are shown as average±STDV (n=3).

[0020] FIG. 4: Protein levels of TCF4 measured by western blot (WB). U2OS cells were electroporated with the indicated RNP combinations, protein was extracted (7) days after electroporation following lysis with RIPA. WB was performed with anti-TCF4 and anti-GAPDH antibodies.

[0021] FIG. 5: Percent (%) excision measured by ddPCR. U2OS cells were electroporated with the indicated RNP combinations and genomic DNA was extracted seven (7) days after electroporation. ddPCR was performed in QX200 BioRad system, with primers and a probe specific for the excision pattern of g4+g6 (FAM) or RPP30 as a housekeeping gene (HEX). The results show the % of excision calculated from the FAM/HEX ratio (average±STDV, n=3).

[0022] FIGS. 6A-6B: Editing and excision of OMNI-103 and OMNI-110 in HeLa cells using DNA transfection. HeLa cells were transfected with plasmids encoding the indicated nuclease and sgRNA. FIG. 6A: Cells were harvested 72 h post DNA transfection, genomic DNA was extracted, and the region of the target guide was amplified and analyzed by NGS. The graph represents the % of editing±STDV from three independent transfection wells. FIG. 6B: Genomic DNA was extracted seven (7) days after electroporation and ddPCR was performed in QX200 BioRad system using EvaGreen, with primers specific for excision events or RPP30 as a housekeeping gene. The results show the % of excision calculated from excision/HKG ratio (avg STDV, n=2).

[0023] FIG. 7: Protein levels of TCF4 measured by western blot. HeLa cells were electroporated with the indicated composition, and protein was extracted 14 days after transfection followed by lysis with RIPA. Western blot was performed with anti-TCF4 and anti-GAPDH antibodies.

[0024] FIGS. 8A-8B: Editing and excision of OMNI-50 in U2OS cells using LVLPs. FIG. 8A: U2OS cells were infected with downstream and upstream to the repeat compositions. Three (3) days post infection, cells were harvested, genomic DNA was extracted, and the region of the target guide was amplified and analyzed by NGS. FIG. 8B: U2OS cells were infected with either a mix of upstream and downstream composition packed in LVLPs or with LVLPs which contained both compositions in the same particle (all in one). 18 days post infection, cells were harvested for genomic DNA extraction, and excision was measured using ddPCR.

[0025] FIG. 9: mRNA levels of TCF4 measured by qRT-PCR after excision with LVLPs. U2OS cells were infected with downstream and upstream to the repeat compositions, RNA was extracted 21 days after electroporation followed by cDNA preparation. qRT-PCR was performed with fast SYBR using specific primers for the exon11-exon12 junction of TCF4 gene. Results shown as average±STDV (n=2).

### DETAILED DESCRIPTION

[0026] In healthy individuals, TCF4 is a transcription factor expressed in the corneal endothelium where it regulates the switch between proliferation and differentiation. However, in many Fuchs endothelial corneal dystrophy (FECD) patients, a repeat expansion in TCF4 leads to either toxic RNA formation, dysregulation of TCF4 protein, or toxic protein aggregates (due to repeat-associated non-AUG dependent (RAN) translation), which eventually leads to transcriptional dysfunction and eventually cell death.

[0027] Fuchs endothelial corneal dystrophy (FECD) is characterized by formation of guttea-microscopic collagenous aggregates upon the endothelial corneal cells. These aggregates initially lead to blurred vision, which deteriorates over time and can eventually lead to corneal blindness. 70% of FECD subjects in the U.S. carry the TCF4 repeat expansion. The disease is inherited in an autosomal dominant manner.

[0028] The present disclosure provides approaches for excising a repeat expansion from at least one TCF4 allele in a cell.

[0029] The present disclosure also provides methods of treating, preventing, or ameliorating Fuchs endothelial corneal dystrophy (FECD) by excising a repeat expansion from at least one TCF4 allele in a subject.

[0030] In some embodiments, the present disclosure provides a method for utilizing at least one naturally occurring nucleotide difference or polymorphism (e.g., single nucleotide polymorphism (SNP)) for distinguishing/discriminating between two alleles of a gene, one allele bearing a mutation (e.g. a repeat expansion in TCF4) such that it encodes a mutated product causing a disease phenotype (“mutated allele”) and a particular sequence in a SNP position (REF/SNP), and the other allele encoding for a functional product (“functional allele”). In some embodiments, the SNP position is utilized for distinguishing/discriminating between two alleles of a gene bearing one or more disease associated mutations, such as to target one of the alleles bearing both the particular sequence in the SNP position (SNP/REF) and a disease associated mutation. In some embodiments, the disease-associated mutation is targeted. In some embodiments, the method further comprises the step of knocking out expression of the mutated protein and allowing expression of the functional protein.

[0031] Unless otherwise defined, all technical and/or scientific terms used herein have the same meaning as commonly understood by one of ordinary skill in the art to which the invention pertains. Although methods and materials similar or equivalent to those described herein can be used in the practice or testing of embodiments of the invention, exemplary methods and/or materials are described below. In case of conflict, the patent specification, including definitions, will control. In addition, the materials, methods, and examples are illustrative only and are not intended to be necessarily limiting.

[0032] It should be understood that the terms “a” and “an” as used above and elsewhere herein refer to “one or more” of the enumerated components. It will be clear to one of ordinary skill in the art that the use of the singular includes the plural unless specifically stated otherwise. Therefore, the terms “a,” “an” and “at least one” are used interchangeably in this application.

[0033] For purposes of better understanding the present teachings and in no way limiting the scope of the teachings, unless otherwise indicated, all numbers expressing quantities, percentages or proportions, and other numerical values used in the specification and claims, are to be understood as being modified in all instances by the term “about.” Accordingly, unless indicated to the contrary, the numerical parameters set forth in the following specification and attached claims are approximations that may vary depending upon the desired properties sought to be obtained. At the very least, each numerical parameter should at least be construed in light of the number of reported significant digits and by applying ordinary rounding techniques.

[0034] Unless otherwise stated, adjectives such as “substantially” and “about” modifying a condition or relationship characteristic of a feature or features of an embodiment of the invention, are understood to mean that the condition or characteristic is defined to within tolerances that are acceptable for operation of the embodiment for an application for which it is intended. Unless otherwise indicated, the word “or” in the specification and claims is considered to be the inclusive “or” rather than the exclusive or, and indicates at least one of, or any combination of items it conjoins.

[0035] In the description and claims of the present application, each of the verbs, “comprise,” “include” and “have” and conjugates thereof, are used to indicate that the object or objects of the verb are not necessarily a complete listing of components, elements or parts of the subject or subjects of the verb. Other terms as used herein are meant to be defined by their well-known meanings in the art.

[0036] In some embodiments of the present invention, a DNA nuclease is utilized to affect a DNA break at a target site to induce cellular repair mechanisms, for example, but not limited to, non-homologous end-joining (NHEJ). During classical NHEJ, two ends of a double-strand break (DSB) site are ligated together in a fast but also inaccurate manner (i.e. frequently resulting in mutation of the DNA at the cleavage site in the form of small insertion or deletions).

[0037] As used herein, the term “modified cells” refers to cells in which a double strand break is affected by a complex of an RNA molecule and the CRISPR nuclease as a result of hybridization with the target sequence, i.e. on-target hybridization.

[0038] This invention provides a modified cell or cells obtained by use of any of the methods described herein. In an embodiment these modified cell or cells are capable of giving rise to progeny cells. In an embodiment these modified cell or cells are capable of giving rise to progeny cells after engraftment. As a non-limiting example, the modified cells may be hematopoietic stem cells (HSCs), or any cell suitable for an allogenic cell transplant or autologous cell transplant.

[0039] As used herein, the term “targeting sequence” or “targeting molecule” refers a nucleotide sequence or molecule comprising a nucleotide sequence that is capable of hybridizing to a specific target sequence, e.g., the targeting sequence has a nucleotide sequence which is at least partially complementary to the sequence being targeted along the length of the targeting sequence. The targeting sequence or targeting molecule may be part of an RNA molecule that can form a complex with a CRISPR nuclease, either alone or in combination with other RNA molecules, with the targeting sequence serving as the targeting portion of the CRISPR complex. When the molecule having the targeting sequence is present contemporaneously with the CRISPR nuclease, the RNA molecule, alone or in combination with an additional one or more RNA molecules (e.g. a tracrRNA molecule), is capable of targeting the CRISPR nuclease to the specific target sequence. As non-limiting example, a guide sequence portion of a CRISPR RNA molecule or single-guide RNA molecule may serve as a targeting molecule. Each possibility represents a separate embodiment. A targeting sequence can be custom designed to target any desired sequence.

[0040] The term “targets” as used herein, refers to preferentially hybridizing a targeting sequence of a targeting molecule to a nucleic acid having a targeted nucleotide sequence. It is understood that the term “targets” encompasses variable hybridization efficiencies, such that there is preferential targeting of the nucleic acid having the targeted nucleotide sequence, but unintentional off-target hybridization in addition to on-target hybridization might also occur. It is understood that where an RNA molecule targets a sequence, a complex of the RNA molecule and a CRISPR nuclease molecule targets the sequence for nuclease activity.

[0041] The “guide sequence portion” of an RNA molecule refers to a nucleotide sequence that is capable of hybridizing to a specific target DNA sequence, e.g., the guide sequence portion has a nucleotide sequence which is partially or fully complementary to the DNA sequence being targeted along the length of the guide sequence portion. In some embodiments, the guide sequence portion is 17, 18, 19, 20, 21, 22, 23, 24, 25, 26, 27, 28, 29, 30, 31, 32, 33, 34, 35, 36, 37, 38, 39, 40, 41, 42, 43, 44, 45, 46, 47, 48, 49 or 50 nucleotides in length, or approximately 17-50, 17-49, 17-48, 17-47, 17-46, 17-45, 17-44, 17-43, 17-42, 17-41, 17-40, 17-39, 17-38, 17-37, 17-36, 17-35, 17-34, 17-33, 17-31, 17-50, 17-29, 17-28, 17-27, 17-26, 17-25, 17-24, 17-22, 17-21, 18-25, 18-24, 18-23, 18-22, 18-21, 19-25, 19-24, 19-23, 19-22, 19-21, 19-20, 20-22, 18-20, 20-21, 21-22, or 17-20 nucleotides in length. Preferably, the entire length of the guide sequence portion is fully complementary to the DNA sequence being targeted along the length of the guide sequence portion. The guide sequence portion may be part of an RNA molecule that can form a complex with a CRISPR nuclease with the guide sequence portion serving as the DNA targeting portion of the CRISPR complex. When the RNA molecule having the guide sequence portion is present contemporaneously with the CRISPR molecule, alone or in combination with an additional one or more RNA molecules (e.g. a tracrRNA molecule), the RNA molecule is capable of targeting the CRISPR nuclease to the specific target DNA sequence. Accordingly, a CRISPR complex can be formed by direct binding of the RNA molecule having the guide sequence portion to a CRISPR nuclease or by binding of the RNA molecule having the guide sequence portion and an additional one or more RNA molecules to the CRISPR nuclease. Each possibility represents a separate embodiment. A guide sequence portion can be custom designed to target any desired sequence. Accordingly, a molecule comprising a “guide sequence portion” is a type of targeting molecule. In some embodiments, the guide sequence portion comprises a sequence that is the same as, or differs by no more than 1, 2, 3, 4, or 5 nucleotides from, a guide sequence portion described herein, e.g., a guide sequence set forth in any of SEQ ID NOs: 1-2325. Each possibility represents a separate embodiment. In some of these embodiments, the guide sequence portion comprises a sequence that is the same as a sequence set forth in any of SEQ ID NOs: 1-2325. Throughout this application, the terms “guide molecule,” “RNA guide molecule,” “guide RNA molecule,” and “gRNA molecule” are synonymous with a molecule comprising a guide sequence portion. In some embodiments, a molecule comprising a guide sequence portion is a crRNA molecule. In some embodiments, a molecule comprising a guide sequence portion is a crRNA molecule, which is preferably accompanied by a compatible tracrRNA molecule capable of forming a crRNA:tracrRNA complex with the crRNA molecule. In some embodiments, a molecule comprising a guide sequence portion is a sgRNA molecule.

[0042] The term “non-discriminatory” as used herein refers to a guide sequence portion of an RNA molecule that targets a specific DNA sequence that is common to all alleles of a gene.

[0043] The term “single nucleotide polymorphism (SNP) position”, as used herein, refers to a position in which a single nucleotide DNA sequence variation occurs between members of a species, or between paired chromosomes in an individual. In the case that a SNP position exists at paired chromosomes in an individual, a SNP on one of the chromosomes is a “heterozygous SNP.” The term SNP position refers to the particular nucleic acid position where a specific variation occurs and encompasses both a sequence including the variation from the most frequently occurring base at the particular nucleic acid position (also referred to as “SNP” or alternative “ALT”) and a sequence including the most frequently occurring base at the particular nucleic acid position (also referred to as reference, or “REF”). Accordingly, the sequence of a SNP position may reflect a SNP (i.e. an alternative sequence variant relative to a consensus reference sequence within a population), or the reference sequence itself.

[0044] In some embodiments, the present disclosure provides a method for utilizing at least one naturally occurring nucleotide difference or polymorphism (e.g., single nucleotide polymorphism (SNP)) for distinguishing/discriminating between two alleles of a gene, one allele bearing a mutation (e.g. an expanded trinucleotide repeat in TCF4) such that it encodes a mutated product causing a disease phenotype (“mutated allele”) and a particular sequence in a SNP position (SNP/REF), and the other allele encoding for a functional product (“functional allele”). The method further comprises the step of knocking out expression of the mutated protein and allowing expression of the functional protein. In some embodiments, the method is for treating, ameliorating, or preventing a dominant negative genetic disorder.

[0045] In accordance with some embodiments, there is provided an RNA molecule which binds to/associates with and/or directs an RNA-guided DNA nuclease to a sequence comprising at least one nucleotide which differs between a mutated allele and a functional allele (e.g., SNP) of a gene of interest (i.e., a sequence of the mutated allele which is not present in the functional allele). The sequence may be within the disease associated mutation. The sequence may be upstream or downstream to the disease associated mutation. Any sequence difference between the mutated allele and the functional allele may be targeted by an RNA molecule of the present invention.

[0046] In embodiments of the present invention, an RNA molecule comprises a guide sequence portion having 17-50 contiguous nucleotides containing nucleotides in the sequence set forth in any one of SEQ ID NOs: 1-2325.

[0047] The RNA molecule and or the guide sequence portion of the RNA molecule may contain modified nucleotides. Exemplary modifications to nucleotides/polynucleotides may be synthetic and encompass polynucleotides which contain nucleotides comprising bases other than the naturally occurring adenine, cytosine, thymine, uracil, or guanine bases. Modifications to polynucleotides include polynucleotides which contain synthetic, non-naturally occurring nucleosides e.g., locked nucleic acids. Modifications to polynucleotides may be utilized to increase or decrease stability of an RNA. An example of a modified polynucleotide is an mRNA containing 1-methyl pseudo-uridine. For examples of modified polynucleotides and their uses, see U.S. Pat. No. 8,278,036, PCT International Publication No. WO/2015/006747, and Weissman and Kariko (2015), each of which is hereby incorporated by reference.

[0048] As used herein, “contiguous nucleotides” set forth in a SEQ ID NO refers to nucleotides in a sequence of nucleotides in the order set forth in the SEQ ID NO without any intervening nucleotides.

[0049] In embodiments of the present invention, the guide sequence portion may be 17-50 nucleotides in length and contain 20-22 contiguous nucleotides in the sequence set forth in any one of SEQ ID NOs: 1-2325. In embodiments of the present invention, the guide sequence portion may be less than 22 nucleotides in length. For example, in embodiments of the present invention the guide sequence portion may be 17, 18, 19, 20, or 21 nucleotides in length. In such embodiments the guide sequence portion may consist of 17, 18, 19, 20, or 21 nucleotides, respectively, in the sequence of 17-22 contiguous nucleotides set forth in any one of SEQ ID NOs: 1-2325. For example, a guide sequence portion having 17 nucleotides in the sequence of 17 contiguous nucleotides set forth in SEQ ID NO: 2326 may consist of any one of the following nucleotide sequences (nucleotides excluded from the contiguous sequence are marked in strike-through):

(SEQ ID NO: 2326)
AAAAAAAUGUACUUGGUUCC
17 nucleotide guide sequence 1:
(SEQ ID NO: 2327) [symbol]
AAAAUGUACUUGGUUCC
17 nucleotide guide sequence 2:
(SEQ ID NO: 2328) [symbol]
AAAAAUGUACUUGGUUC [symbol]
17 nucleotide guide sequence 3:
(SEQ ID NO: 2329) [symbol]
AAAAAAUGUACUUGGUU [symbol]
17 nucleotide guide sequence 4:
(SEQ ID NO: 2330)
AAAAAAAUGUACUUGGU

[symbol]

[0050] In embodiments of the present invention, the guide sequence portion may be greater than 20 nucleotides in length. For example, in embodiments of the present invention the guide sequence portion may be 21, 22, 23, 24, 25, 26, 27, 28, 29, or 30 nucleotides in length. In such embodiments the guide sequence portion comprises 17-50 nucleotides containing the sequence of 20, 21 or 22 contiguous nucleotides set forth in any one of SEQ ID NOs: 1-2325 and additional nucleotides fully complimentary to a nucleotide or sequence of nucleotides adjacent to the 3′ end of the target sequence, 5′ end of the target sequence, or both.

[0051] In embodiments of the present invention a CRISPR nuclease and an RNA molecule comprising a guide sequence portion form a CRISPR complex that binds to a target DNA sequence to effect cleavage of the target DNA sequence. CRISPR nucleases, e.g. Cpf1, may form a CRISPR complex comprising a CRISPR nuclease and RNA molecule without a further tracrRNA molecule. Alternatively, CRISPR nucleases. e.g. Cas9, may form a CRISPR complex between the CRISPR nuclease, an RNA molecule, and atracrRNA molecule. A guide sequence portion, which comprises a nucleotide sequence that is capable of hybridizing to a specific target DNA sequence, and a sequence portion that participates in CRISPR nuclease binding, e.g. a tracrRNA sequence portion, can be located on the same RNA molecule. Alternatively, a guide sequence portion may be located on one RNA molecule and a sequence portion that participates in CRISPR nuclease binding, e.g. a tracrRNA portion, may located on a separate RNA molecule. A single RNA molecule comprising a guide sequence portion (e.g. a DNA-targeting RNA sequence) and at least one CRISPR protein-binding RNA sequence portion (e.g. a tracrRNA sequence portion), can form a complex with a CRISPR nuclease and serve as the DNA-targeting molecule. In some embodiments, a first RNA molecule comprising a DNA-targeting RNA portion, which includes a guide sequence portion, and a second RNA molecule comprising a CRISPR protein-binding RNA sequence interact by base pairing to form an RNA complex that targets the CRISPR nuclease to a DNA target site or, alternatively, are fused together to form an RNA molecule that complexes with the CRISPR nuclease and targets the CRISPR nuclease to a DNA target site.

[0052] In embodiments of the present invention, an RNA molecule comprising a guide sequence portion may further comprise the sequence of a tracrRNA molecule. Such embodiments may be designed as a synthetic fusion of the guide portion of the RNA molecule and the trans-activating crRNA (tracrRNA). (See Jinek et al., 2012). In such an embodiment, the RNA molecule is a single guide RNA (sgRNA) molecule. Embodiments of the present invention may also form CRISPR complexes utilizing a separate tracrRNA molecule and a separate RNA molecule comprising a guide sequence portion. In such embodiments the tracrRNA molecule may hybridize with the RNA molecule via basepairing and may be advantageous in certain applications of the invention described herein.

[0053] The term “tracr mate sequence” refers to a sequence sufficiently complementary to a tracrRNA molecule so as to hybridize to the tracrRNA via basepairing and promote the formation of a CRISPR complex. (See U.S. Pat. No. 8,906,616). In embodiments of the present invention, the RNA molecule may further comprise a portion having a tracr mate sequence.

[0054] A “gene,” for the purposes of the present disclosure, includes a DNA region encoding a gene product. as well as all DNA regions which regulate the production of the gene product, whether or not such regulatory sequences are adjacent to coding and/or transcribed sequences. Accordingly, a gene includes, but is not necessarily limited to, promoter sequences, terminators, translational regulatory sequences such as ribosome binding sites and internal ribosome entry sites, enhancers, silencers, insulators, boundary elements, replication origins, matrix attachment sites and locus control regions.

[0055] “Eukaryotic” cells include, but are not limited to, fungal cells (such as yeast), plant cells, animal cells, mammalian cells and human cells.

[0056] The term “nuclease” as used herein refers to an enzyme capable of cleaving the phosphodiester bonds between the nucleotide subunits of nucleic acid. A nuclease may be isolated or derived from a natural source. The natural source may be any living organism. Alternatively, a nuclease may be a modified or a synthetic protein which retains the phosphodiester bond cleaving activity. Gene modification can be achieved using a nuclease, for example a CRISPR nuclease.

[0057] According to embodiments of the present invention, there is provided a method of excising an intronic trinucleotide CTG repeat expansion from a Transcription Factor 4 (TCF4) allele in a cell, the method comprising
[0058] introducing to the cell a composition comprising:
   [0059] at least one CRISPR nuclease, or a nucleotide molecule encoding a CRISPR nuclease; and
   [0060] a first RNA molecule comprising a first guide sequence portion, or a nucleotide molecule encoding the first RNA molecule; and
   [0061] a second RNA molecule comprising a second guide sequence portion, or a nucleotide molecule encoding the second RNA molecule,
[0062] wherein a complex of the CRISPR nuclease and the first RNA molecule affects a double strand break upstream of the intronic trinucleotide CTG repeat expansion and a complex of the CRISPR nuclease and the second RNA molecule affects a double strand break downstream of the intronic trinucleotide CTG repeat expansion,
[0063] wherein the first guide sequence portion comprises 17-50 contiguous nucleotides containing nucleotides in the sequence set forth in any one of SEQ ID NOs: 1216-2325 and the second guide sequence portion comprises 17-50 contiguous nucleotides containing nucleotides in the sequence set forth in any one of SEQ ID NOs: 1-1215.

[0064] In some embodiments, the RNA molecule is a crRNA molecule and the composition further comprises a tracrRNA molecule that forms a crRNA:tracrRNA molecule with the crRNA molecule. In some embodiments, the RNA molecule is an sgRNA molecule.

[0065] In some embodiments, the first guide sequence portion comprises 17-50 contiguous nucleotides containing nucleotides in the sequence set forth in any one of SEQ ID NOs: 1216-2325 and the second guide sequence portion comprises 17-50 contiguous nucleotides containing nucleotides in the sequence set forth in any one of SEQ ID NOs: 1-1215 and wherein at least one TCF4 allele in the cell comprises a heterozygous SNP at the rs34071688 position.

[0066] In some embodiments, the first guide sequence portion comprises 17-50 contiguous nucleotides containing nucleotides in the sequence set forth in any one of SEQ ID NOs: 1216-2325 and the second guide sequence portion comprises 17-50 contiguous nucleotides containing nucleotides in the sequence set forth in any one of SEQ ID NOs: 1-1215 and wherein at least one TCF4 allele in the cell comprises a heterozygous SNP at any one of the positions selected from the group consisting of rs746872826, 18:5558615, rs879522127. and rs1268568114.

[0067] In some embodiments, the first guide sequence portion comprises 17-50 contiguous nucleotides containing nucleotides in the sequence set forth in any one of SEQ ID NOs: 1-1215 and the second guide sequence portion comprises 17-50 contiguous nucleotides containing nucleotides in the sequence set forth in any one of SEQ ID NOs: 1-1215 and wherein at least one TCF4 allele in the cell comprises a heterozygous SNP at any one of the SNP positions selected from the group consisting of rs71670792, rs1261085, rs1261084, rs11431395, rs373174214, rs35555522, rs66807288, rs141970461, rs71674214, rs8766. rs10221362, rs2276195, rs569385112, rs398041379, rs72925008. rs8090085, rs5825130, rs56887277, rs397836157. rs55755941, rs781691419, rs11409023, rs10221357, rs11661961, rs11660565, rs61656112, rs60565673, rs72925018, rs1261073, rs1261076, rs748718974, rs13381800, rs34773632, rs1942265, rs7241077, rs62092440, rs1893431, rs3838898, rs1893430, 18:55251930_G_GTTTT, rs771385941, rs4800988, rs1942264, rs1261093, rs1539950, rs1539951, rs62092442, rs62092444, rs11662842, rs11664992, rs1261134, rs1261114, rs1788027, rs397858367, rs113662542, rs1261118, rs10701336, rs397809469, rs150323043, rs1038226655, rs149454001, rs796169498, rs9955026, rs1046741326, rs754435392, rs867471715, rs777608256, rs762153709, rs1153636, rs1153637, rs5825134. rs35480166, rs893946, rs374155330, rs781053385. rs899293868, rs996440450, rs1349129287. rs780424692, rs34702622. rs11428164, rs1660235, rs1440473, rs1788026, rs11332509, rs1660237, rs1631486, rs1025804, rs753933037, rs1660233, rs200650987, rs71951255, rs368762262, rs751007744, rs780342991, rs1660241, rs796749696, rs61468075, rs777518462, rs1660242, rs1440476. rs1011392, 18:55374871_T_TA, rs1788030, rs1623427, rs1621581, rs1788025. rs1788023, rs1348047. rs1788019, rs9950000, rs9958125, rs9320010, rs3794891, rs757629087, rs772409228, rs12607679, rs3794889, rs4801149, rs12605773, rs2872041, rs4801150, rs1020169, rs7238888, rs7235757, rs2958178, rs2958165, rs2958171, rs1328839434, rs796792902, rs2958175, rs11309751, rs2958186, rs2919446, rs2958161, rs2860511, rs2958162, rs2919451, rs2919450, rs201657057, rs2958163. rs1440477, rs2958166, rs377458803, rs2958169, rs8098843. rs11412305, rs386387765, 18:55423173_T_TA, rs781071274, rs4374254, rs370693034, rs761981780, rs8084308, rs77540208, rs9320016, rs4524013, rs1025639279, rs4500831, rs7229456, rs12967143, rs12963334, rs12963463, rs398100891, rs12958048, 18:55434419_C_CTTT, rs375388593, rs140134419, rs4801153, rs4801154, rs745460290, rs527450659, rs4341827, rs4468713, rs7228159, rs145330990, rs7231748, rs34577882, rs34578042, rs1452789, rs1452788, rs12606995, rs188225813, rs732779, rs11385247, rs9966430, rs2924321, rs151196106, rs3760600, rs2924328, rs1377243, rs2924329, rs5825142, rs199707137, 18:55468891_C_CCCA, rs11338618, rs149728054, rs11298284, rs7233312, rs2924331, 18:55480276_C_CAA, rs2958182, rs2958183, rs2958184, rs2924332, rs2924333, rs2060889, rs2958187, rs2924335, rs138885827, rs2924336, rs59413482, rs796565215, 18:55496896_C_CAA, rs4801157, rs2958188, rs2958189, rs2060886, rs3017183, rs2958158, rs2924338, rs12956276, rs55812411, rs776881842. rs1452791. rs9957668, rs9954890, rs9964328, rs67387556, rs1491335073, 18:55511330_T_TAAA, rs751932079, rs2957261, 18:55511331_T_TAAAA, rs8090106, rs140221855, rs17089851, rs398032944, rs1341922999, rs624244, rs627685, rs9948513, rs9965067, rs9965195, rs35371867, rs11441646, rs9949107, rs7240986, rs4801158, rs72627231, rs11412432, rs33938531, rs4800990, rs4458089, rs4572488, rs12968271, rs9636107. rs2123389, rs9947814, rs71352207, rs1452787, rs2123392. rs2123393, 18:55559041_T_TA, rs34935191, rs74182105, rs139870092, rs76053687, rs150848781. rs564960433, rs41396445, and rs34232463.

[0068] In some embodiments, the composition is introduced to a cell in a subject or to a cell in culture.

[0069] In some embodiments, the cell is a corneal cell or a corneal endothelial cell.

[0070] In some embodiments, the composition is introduced to the cell in vivo.

[0071] In some embodiments, the composition is introduced to the cell by a lentivirus-like particle (LVLP).

[0072] In some embodiments, the cell is a stem cell, a fibroblast, blood cell, hepatocyte, keratinocyte, any other cell type capable of being reprogrammed to an induced pluripotent stem cell (iPSC), a hematopoietic stem cell (HSC), an induced pluripotent stem cell (iPS cell), an iPSc-derived cell, or a iPSc-derived corneal endothelial cell.

[0073] In some embodiments, the composition is introduced to the cell ex vivo.

[0074] In some embodiments, the CRISPR nuclease, the first RNA molecule, and the second RNA molecule are introduced to the cell at substantially the same time or at different times.

[0075] In some embodiments, the first or second RNA molecule is a crRNA molecule or a sgRNA molecule.

[0076] According to embodiments of the present invention, there is provided a composition comprising an RNA molecule having a guide sequence portion that comprises 17-50 contiguous nucleotides containing nucleotides in the sequence set forth in any one of SEQ ID NOs: 1-2325.

[0077] In some embodiments, the composition further comprises a second RNA molecule, wherein the first RNA molecule has a guide sequence portion that comprises 17-50 contiguous nucleotides containing nucleotides in the sequence set forth in any one of SEQ ID NOs: 1216-2325, and the second RNA molecule has a guide sequence portion that comprises 17-50 contiguous nucleotides containing nucleotides in the sequence set forth in any one of SEQ ID NOs: 1-1215.

[0078] In some embodiments, the composition further comprises a CRISPR nuclease.

[0079] In some embodiments, the composition further comprises a tracrRNA molecule.

[0080] According to embodiments of the present invention, there is provided a cell modified by any one of the disclosed methods, or a cell modified using any one of the disclosed compositions.

[0081] In some embodiments, the cell is a corneal cell or corneal endothelial cell.

[0082] In some embodiments, the cell is a stem cell, or a fibroblast, blood cell, hepatocyte, keratinocyte, or any other cell type capable of being reprogrammed to an induced pluripotent stem cell (iPSC), a hematopoietic stem cell (HSC), iPSC-derived cell, or a iPSC-derived corneal endothelial cell.

[0083] In some embodiments, the stem cell is differentiated after it is modified.

[0084] In some embodiments, the stem cell is differentiated into a corneal cell or a corneal endothelial cell.

[0085] According to embodiments of the present invention, there is provided a method of treating Fuchs Endothelial Corneal Dystrophy (FECD) in a human subject. the method comprising delivering any one of the compositions described herein to the subject, or transplanting any one of the modified cells described herein to a cornea of the human subject.

[0086] In some embodiments, the composition is delivered to a cell in the cornea of a patient in vivo.

[0087] In some embodiments, the composition is introduced to the cell by a lentivirus-like particle (LVLP).

[0088] In some embodiments, the modified cell is delivered to a cell in the cornea of a patient ex vivo.

[0089] According to embodiments of the present invention, there is provided a medicament comprising the any one of the compositions described herein for use in excising an intronic trinucleotide CTG repeat expansion from a TCF4 allele in a cell, wherein the medicament is administered by delivering to the cell the composition.

[0090] According to embodiments of the present invention, there is provided use of any one of the compositions described herein or any one of the modified cells described herein for treating FECD. comprising delivering the composition or the modified cell to a subject having or at risk of having FECD.

[0091] According to embodiments of the present invention, there is provided a medicament comprising any one of the compositions described herein or any one of the modified cells described herein for use in treating FECD, wherein the medicament is administered by delivering the composition or the modified cell to a subject having or at risk of having FECD.

[0092] According to embodiments of the present invention, there is provided a kit for excising an intronic trinucleotide CTG repeat expansion from a TCF4 allele in a cell, comprising any one of the compositions described herein and instructions for delivering the composition to the cell.

[0093] In some embodiments, the composition is delivered to the cell ex vivo.

[0094] According to embodiments of the present invention, there is provided a kit for administering treating FECD in a subject, comprising any one of the compositions described herein or any one of the modified cells described herein and instructions for delivering the composition or modified cell to a subject having or at risk of having FECD.

[0095] According to embodiments of the present invention, there is provided any one of the compositions described herein or any one of the modified cells described herein for use in treating FECD. comprising delivering the composition or the modified cell to a subject having or at risk of having FECD.

[0096] In some embodiments, the first or second RNA molecules recited in the methods and compositions described herein may be modified to contain 1, 2, 3, 4, or 5 nucleotide mismatches in its guide sequence portion relative to its intended target sequence. In some embodiments, these mismatches provide higher targeting specificity to a complex of the CRISPR nuclease and the RNA molecule compared to the specificity provided by a guide sequence portion that has higher complementarity to its intended target sequence.

[0097] According to embodiments of the present invention, there is provided a gene editing composition comprising an RNA molecule comprising a guide sequence portion having 17-50 contiguous nucleotides containing nucleotides in the sequence set forth in any one of SEQ ID NOs: 1-2325. In some embodiments, the RNA molecule further comprises a portion having a sequence which binds to a CRISPR nuclease. In some embodiments, the sequence which binds to a CRISPR nuclease is a tracrRNA sequence.

[0098] In some embodiments, the RNA molecule further comprises a portion having a tracr mate sequence.

[0099] In some embodiments, the RNA molecule may further comprise one or more linker portions.

[0100] According to embodiments of the present invention, an RNA molecule may be up to 1000, 900, 800, 700, 600, 500, 450, 400, 350, 300, 290, 280, 270, 260, 250, 240, 230, 220, 210, 200, 190, 180, 170, 160, 150, 140, 130, 120, 110, or 100 nucleotides in length. Each possibility represents a separate embodiment. In embodiments of the present invention, the RNA molecule may be 17 up to 300 nucleotides in length, 100 up to 300 nucleotides in length, 150 up to 300 nucleotides in length, 100 up to 500 nucleotides in length, 100 up to 400 nucleotides in length, 200 up to 300 nucleotides in length, 100 to 200 nucleotides in length, or 150 up to 250 nucleotides in length. Each possibility represents a separate embodiment.

[0101] According to some embodiments of the present invention, the composition further comprises a tracrRNA molecule.

[0102] According to some embodiments of the present invention, there is provided a method for excising an intronic trinucleotide CTG repeat expansion from a Transcription Factor 4 (TCF4) allele in a cell, the method comprising delivering to the cell a composition comprising an RNA molecule comprising a guide sequence portion having 17-50 contiguous nucleotides containing nucleotides in the sequence set forth in any one of SEQ ID NOs: 1216-2325 and a CRISPR nuclease and a second RNA molecule comprising a guide sequence portion having 17-50 contiguous nucleotides containing nucleotides in the sequence set forth in any one of SEQ ID NOs: 1-1215 and a CRISPR nuclease.

[0103] According to embodiments of the present invention, at least one CRISPR nuclease and the RNA molecule or RNA molecules are delivered to the subject and/or cells substantially at the same time or at different times.

[0104] In some embodiments, a tracrRNA molecule is delivered to the subject and/or cells substantially at the same time or at different times as the CRISPR nuclease and RNA molecule or RNA molecules.

[0105] The compositions and methods of the present disclosure may be utilized for Fuchs Endothelial Corneal Dystrophy (FECD) therapy.

[0106] Any one of, or combination of, the above-mentioned strategies for deactivating TCF4 expression may be used in the context of the invention.

[0107] Embodiments of compositions described herein include at least one CRISPR nuclease, RNA molecule(s), and a tracrRNA molecule, being effective in a subject or cells at the same time. The at least one CRISPR nuclease, RNA molecule(s), and tracrRNA may be delivered substantially at the same time or can be delivered at different times but have effect at the same time. For example, this includes delivering the CRISPR nuclease to the subject or cells before the RNA molecule and/or tracrRNA is substantially extant in the subject or cells.

[0108] In some embodiments, the cell is a cell in the cornea. In some embodiments, the cell is a corneal endothelial cell. In some embodiments, the cell is a stem cell, or a fibroblast, blood cell, hepatocyte, keratinocyte, or any other cell type capable of being reprogrammed to an induced pluripotent stem cell (iPSC).

### TCF4 Editing Strategies to Excise a CTG Expanded Repeat

[0109] The TCF4 gene encodes Transcription Factor 4, a basic helix-loop-helix transcription factor. The encoded protein recognizes an Ephrussi-box (‘E-box’) binding site (‘CANNTG’)—a motif first identified in immunoglobulin enhancers. This gene is broadly expressed and may play an important role in nervous system development. Defects in this gene are a cause of Pitt-Hopkins syndrome. Multiple alternatively spliced transcript variants that encode different proteins have been described.

[0110] Furthermore, a TCF4 intronic CTG repeat normally numbering 10-37 repeat units can expand to >50 repeat units and cause disease. Specifically, Fuchs Endothelial Corneal Dystrophy causative mutations are heterozygous TCF4 intronic trinucleotide repeat expansions (CTG)n. The CTG repeats are bidirectionally transcribed leading to the disease, therefore, a therapeutic strategy involves excision of the CTG repeats from a TCF4 allele.

[0111] Thus, the present invention provides methods to excise a CTG three nucleotide repeat (TNR) from at least one TCF4 allele using two guide molecules. The repeat is located in TCF4 intron 3, which begins at 18:55587044 and ends at 18:55585353.

[0112] One strategy is to perform biallelic excision of the TCF4 repeats. this can be achieved by utilizing guides adjacent to the expanded repeat in TCF4 intron 3. For example, a first guide may target a region of hg38_chr18:55585922-55586155 (downstream to the repeat) and a second guide may target a region of hg38_chr18: 55586227-55586483 (upstream to the repeat) to excise the expanded TCF4 repeat.

[0113] Monoallelic excision of a TCF4 expanded repeat can be achieved by utilizing a first guide targeting a SNP located in intron 3, upstream or downstream to the expanded repeat, and a second, non-discriminatory guide targeting a sequence in intron 3. For example, excision of an TCF4 expanded repeat may be performed by using a first guide to target the SNP position rs34071688, which is located upstream to the repeat, and a second, non-discriminatory guide targeting a sequence located downstream to the repeat.

[0114] Monoallelic excision of a TCF4 expanded repeat be can also be achieved by excising the expanded repeat while knocking-out the allele with the expanded repeat. This can be done by utilizing guides targeting SNPs located in different regions of the gene such as, exons, introns, promoter regions or in intergenic regions, downstream or upstream to the gene. The non-discriminatory guide should be located in intron 3 to enable the excision of the gene fragment including the CTG repeats. This strategy would lead to knock-out the allele with the expanded repeat due to excising large fragments that would prevent its transcription, destabilize the transcript, generate an immature stop codon, which would lead to nonsense meditated decay or to a truncated protein.

[0115] In some embodiments, one of the guide molecules targets upstream to the TNR, and the other guide molecule targets downstream to the TNR. Excision of the TNR without altering TCF4 normal expression can be achieved, for example, by excision of CTG TNR by two guides targeting up to 350 nucleotides upstream and up to 250 nucleotides downstream to the TNR.

[0116] In some embodiments, the target cell is a cell in the cornea. In some embodiments, the cell is a corneal endothelial cell. In some embodiments, delivery of the guide molecules is performed in vivo. In some embodiments, the delivery is performed using a lentivirus-like particle (LVLP).

[0117] Alternatively, cells such as iPS derived endothelial cells can be edited ex vivo and transplanted to the cornea, or iPS cells can be edited and then differentiated and transplanted to the cornea.

### CRISPR Nucleases and PAM Recognition

[0118] In some embodiments, the sequence specific nuclease is selected from CRISPR nucleases, or is a functional variant thereof. In some embodiments, the sequence specific nuclease is an RNA guided DNA nuclease. In such embodiments, the RNA sequence which guides the RNA guided DNA nuclease (e.g., Cpf1) binds to and/or directs the RNA guided DNA nuclease to all TCF4 alleles in a cell. In some embodiments, the CRISPR complex does not further comprise a tracrRNA. A skilled artisan will appreciate that RNA molecules can be engineered to bind to a target of choice in a genome by commonly known methods in the art.

[0119] The term “PAM” as used herein refers to a nucleotide sequence of a target DNA located in proximity to the targeted DNA sequence and recognized by the CRISPR nuclease complex. The PAM sequence may differ depending on the nuclease identity. In addition, there are CRISPR nucleases that can target almost all PAMs. In some embodiments of the present invention, a CRISPR system utilizes one or more RNA molecules having a guide sequence portion to direct a CRISPR nuclease to a target DNA site via Watson-Crick base-pairing between the guide sequence portion and the protospacer on the target DNA site, which is next to the protospacer adjacent motif (PAM), which is an additional requirement for target recognition. The CRISPR nuclease then mediates cleavage of the target DNA site to create a double-stranded break within the protospacer. In a non-limiting example, a type II CRISPR system utilizes a mature crRNA:tracrRNA complex that directs the CRISPR nuclease, e.g. Cas9 to the target DNA the target DNA via Watson-Crick base-pairing between the guide sequence portion of the crRNA and the protospacer on the target DNA next to the protospacer adjacent motif (PAM). A skilled artisan will appreciate that each of the engineered RNA molecule of the present invention is further designed such as to associate with a target genomic DNA sequence of interest next to a protospacer adjacent motif (PAM), e.g., a PAM matching the sequence relevant for the type of CRISPR nuclease utilized, such as for a non-limiting example, NGG or NAG, wherein “N” is any nucleobase, for Streptococcus pyogenes Cas9 WT (SpCAS9); NNGRRT for Staphylococcus aureus (SaCas9); NNNVRYM for Jejuni Cas9 WT; NGAN or NGNG for SpCas9-VQR variant: NGCG for SpCas9-VRER variant: NGAG for SpCas9-EQR variant: NRRH for SpCas9-NRRH variant, wherein N is any nucleobase, R is A or G and H is A, C, or T; NRTH for SpCas9-NRTH variant, wherein N is any nucleobase, R is A or G and H is A, C, or T; NRCH for SpCas9-NRCH variant, wherein N is any nucleobase, R is A or G and H is A, C, or T; NG for SpG variant of SpCas9 wherein N is any nucleobase: NG or NA for SpCas9-NG variant of SpCas9 wherein N is any nucleobase: NR or NRN or NYN for SpRY variant of SpCas9, wherein N is any nucleobase, R is A or G and Y is C or T; NNG for Streptococcus canis Cas9 variant (ScCas9), wherein N is any nucleobase; NNNRRT for SaKKH-Cas9 variant of Staphylococcus aureus (SaCas9), wherein N is any nucleobase, and R is A or G; NNNNGATT for Neisseria meningitidis (NmCas9), wherein N is any nucleobase: TTN for Alicyclobacillus acidiphilus Cas12b (AacCas12b), wherein N is any nucleobase; or TTTV for Cpf1, wherein V is A, C or G. RNA molecules of the present invention are each designed to form complexes in conjunction with one or more different CRISPR nucleases and designed to target polynucleotide sequences of interest utilizing one or more different PAM sequences respective to the CRISPR nuclease utilized.

[0120] In some embodiments, an RNA-guided DNA nuclease e.g., a CRISPR nuclease, may be used to cause a DNA break, either double or single-stranded in nature, at a desired location in the genome of a cell. The most commonly used RNA-guided DNA nucleases are derived from CRISPR systems, however, other RNA-guided DNA nucleases are also contemplated for use in the genome editing compositions and methods described herein. For instance, see U.S. Patent Publication No. 2015/0211023, incorporated herein by reference.

[0121] CRISPR systems that may be used in the practice of the invention vary greatly. CRISPR systems can be a type I, a type II, or a type III system. Non-limiting examples of suitable CRISPR proteins include Cas3, Cas4, Cas5, Cas5e (or CasD), Cas6, Cas6e, Cas6f, Cas7, Cas8a1, Cas8a2, Cas8b, Cas8c, Cas9, Cas10, Cas1 Od, CasF, CasG, CasH, Csy1, Csy2, Csy3, Cse1 (or CasA), Cse2 (or CasB), Cse3 (or CasE), Cse4 (or CasC), Csc1, Csc2, Csa5, Csn2, Csm2, Csm3, Csm4, Csm5, Csm6, Cmr1, Cmr3, Cmr4, Cmr5, Cmr6, Csb1, Csb2, Csb3, Csx17, Csx14, Csx10, Csx16, CsaX, Csx3, Csz1, Csx15, Csf1, Csf2, Csf3, Csf4, and Cul966.

[0122] In some embodiments, the RNA-guided DNA nuclease is a CRISPR nuclease derived from a type II CRISPR system (e.g., Cas9). The CRISPR nuclease may be derived from Streptococcus pyogenes, Streptococcus thermophilus, Streptococcus sp., Staphylococcus aureus, Neisseria meningitidis, Treponema denticola, Nocardiopsis dassonvillei, Streptomyces pristinaespiralis, Streptomyces viridochromogenes, Streptomyces viridochromogenes, Streptosporangium roseum, Streptosporangium roseum, Alicyclobacillus acidocaldarius, Bacillus pseudomycoides. Bacillus selenitireducens, Exiguobacterium sibiricum, Lactobacillus delbrueckii, Lactobacillus salivarius, Microscilla marina, Burkholderiales bacterium, Polaromonas naphthalenivorans, Polaromonas sp., Crocosphaera watsonii, Cyanothece sp., Microcystis aeruginosa, Synechococcus sp., Acetohalobium arabaticum, Ammonifex degensii, Caldicelulosiruptor becscii, Candidatus Desulforudis, Clostridium botulinum, Clostridium dificile, Finegoldia magna, Natranaerobius thermophilus, Pelotomaculum thermopropionicum, Acidithiobacillus caldus, Acidithiobacillus ferrooxidans, Allochromatium vinosum, Marinobacter sp., Nitrosococcus halophilus, Nitrosococcus watsoni, Pseudoalteromonas haloplanktis, Ktedonobacter racemifer, Methanohalobium evestigatum, Anabaena variabilis, Nodularia spumigena, Nostoc sp., Arthrospira maxima, Arthrospira platensis, Arthrospira sp., Lyngbya sp., Microcoleus chthonoplastes, Oscillatoria sp., Petrotoga mobilis, Thermosipho africanus, Acaryochloris marina, or any species which encodes a CRISPR nuclease with a known PAM sequence. CRISPR nucleases encoded by uncultured bacteria may also be used in the context of the invention. (See Burstein et al. Nature, 2017). Variants of CRISPR proteins having known PAM sequences e.g., SpCas9 D1135E variant, SpCas9 VQR variant, SpCas9 EQR variant, or SpCas9 VRER variant may also be used in the context of the invention.

[0123] Thus, an RNA guided DNA nuclease of a CRISPR system, such as a Cas9 protein or modified Cas9 or homolog or ortholog of Cas9, or other RNA guided DNA nucleases belonging to other types of CRISPR systems, such as Cpf1 and its homologs and orthologs, may be used in the compositions of the present invention. Additional CRISPR nucleases may also be used, for example, the nucleases described in PCT International Application Publication Nos. WO2020/223514 and WO2020/223553, which are hereby incorporated by reference.

[0124] In certain embodiments, the CRISPR nuclease may be a “functional derivative” of a naturally occurring Cas protein. A “functional derivative” of a native sequence polypeptide is a compound having a qualitative biological property in common with a native sequence polypeptide. “Functional derivatives” include, but are not limited to, fragments of a native sequence and derivatives of a native sequence polypeptide and its fragments, provided that they have a biological activity in common with a corresponding native sequence polypeptide. A biological activity contemplated herein is the ability of the functional derivative to hydrolyze a DNA substrate into fragments. The term “derivative” encompasses both amino acid sequence variants of polypeptide, covalent modifications, and fusions thereof. Suitable derivatives of a Cas polypeptide or a fragment thereof include but are not limited to mutants, fusions, covalent modifications of Cas protein or a fragment thereof. Derivatives include, but are not limited to, CRISPR nickases, catalytically inactive or “dead” CRISPR nucleases, and fusion of a CRISPR nuclease or derivative thereof to other enzymes such as base editors or retrotransposons. See for example, Anzalone et al. (2019) and PCT International Application No. PCT/US2020/037560.

[0125] In some embodiments, the CRISPR nuclease or derivative thereof may be fused to a protein that has an enzymatic activity. In some embodiments, the enzymatic activity modifies a target DNA. In some embodiments, the enzymatic activity is nuclease activity, methyltransferase activity, demethylase activity, DNA repair activity, DNA damage activity, deamination activity, dismutase activity, alkylation activity, depurination activity, oxidation activity, pyrimidine dimer forming activity, integrase activity, transposase activity, recombinase activity, polymerase activity, ligase activity, helicase activity, photolyase activity or glycosylase activity. In some cases, the enzymatic activity is nuclease activity. In some cases, the nuclease activity introduces a double strand break in the target DNA. In some cases, the enzymatic activity modifies a target polypeptide associated with the target DNA. In some cases, the enzymatic activity is methyltransferase activity, demethylase activity, acetyltransferase activity. deacetylase activity. kinase activity, phosphatase activity, ubiquitin ligase activity, deubiquitinating activity. adenylation activity. deadenylation activity, SUMOylating activity, deSUMOylating activity, ribosylation activity, deribosylation activity, myristoylation activity or demyristoylation activity. In some cases, the target polypeptide is a histone and the enzymatic activity is methyltransferase activity, demethylase activity, acetyltransferase activity deacetylase activity, kinase activity, phosphatase activity, ubiquitin ligase activity or deubiquitinating activity.

[0126] Cas protein, which includes Cas protein or a fragment thereof, as well as derivatives of Cas protein or a fragment thereof, may be obtainable from a cell or synthesized chemically or by a combination of these two procedures. The cell may be a cell that naturally produces Cas protein, or a cell that naturally produces Cas protein and is genetically engineered to produce the endogenous Cas protein at a higher expression level or to produce a Cas protein from an exogenously introduced nucleic acid, which nucleic acid encodes a Cas that is same or different from the endogenous Cas. In some cases, the cell does not naturally produce Cas protein and is genetically engineered to produce a Cas protein.

[0127] In some embodiments, the CRISPR nuclease is Cpf1. Cpf1 is a single RNA-guided endonuclease which utilizes a T-rich protospacer-adjacent motif Cpf1 cleaves DNA via a staggered DNA double-stranded break. Two Cpf1 enzymes from Acidaminococcus and Lachnospiraceae have been shown to carry out efficient genome-editing activity in human cells. (See Zetsche et al., 2015).

[0128] Thus, an RNA guided DNA nuclease of a Type II CRISPR System, such as a Cas9 protein or modified Cas9 or homologs, orthologues, or variants of Cas9, or other RNA guided DNA nucleases belonging to other types of CRISPR systems, such as Cpf1 and its homologs, orthologues, or variants, may be used in the present invention.

[0129] In some embodiments, the guide molecule comprises one or more chemical modifications which imparts a new or improved property (e.g., improved stability from degradation, improved hybridization energetics, or improved binding properties with an RNA guided DNA nuclease). Suitable chemical modifications include, but are not limited to: modified bases, modified sugar moieties, or modified inter-nucleoside linkages. Non-limiting examples of suitable chemical modifications include: 4-acetylcytidine, 5-(carboxyhydroxymethyl)uridine, 2′-O-methylcytidine, 5-carboxymethylaminomethyl-2-thiouridine, 5-carboxymethylaminomethyluridine, dihydrouridine, 2′-O-methylpseudouridine, “beta, D-galactosylqueosine”, 2′-O-methylguanosine, inosine, N6-isopentenyladenosine, 1-methyladenosine, 1-methylpseudouridine, 1-methylguanosine, 1-methylinosine, “2,2-dimethylguanosine”, 2-methyladenosine, 2-methylguanosine, 3-methylcytidine, 5-methylcytidine, N6-methyladenosine, 7-methylguanosine, 5-methylaminomethyluridine, 5-methoxyaminomethyl-2-thiouridine, “beta, D-mannosylqueosine”, 5-methoxycarbonylmethyl-2-thiouridine, 5-methoxycarbonylmethyluridine, 5-methoxyuridine, 2-methylthio-N6-isopentenyladenosine, N-((9-beta-D-ribofuranosyl-2-methylthiopurine-6-yl)carbamoyl)threonine, N-((9-beta-D-ribofuranosylpurine-6-yl)N-methylcarbamoyl)threonine. uridine-5-oxyacetic acid-methylester, uridine-5-oxyacetic acid, wybutoxosine, queuosine, 2-thiocytidine, 5-methyl-2-thiouridine, 2-thiouridine, 4-thiouridine, 5-methyluridine, N-((9-beta-D-ribofuranosylpurine-6-yl)-carbamoyl)threonine, 2′-O-methyl-5-methyluridine, 2′-O-methyluridine, wybutosine, “3-(3-amino-3-carboxy-propyl)uridine, (acp3)u”, 2′-O-methyl (M), 3′-phosphorothioate (MS). 3′-thioPACE (MSP), pseudouridine, or 1-methyl pseudo-uridine. Each possibility represents a separate embodiment of the present invention.

[0130] In addition to targeting TCF4 alleles by a RNA-guided CRISPR nuclease, other means of inhibiting TCF4 expression in a target cell include but are not limited to use of a gapmer, shRNA, siRNA, a customized TALEN, meganuclease, or zinc finger nuclease. a small molecule inhibitor, and any other method known in the art for reducing or eliminating expression of a gene in a target cell. See, for example, U.S. Pat. Nos. 6,506,559; 7,560,438; 8,420,391; 8,552,171; 7,056,704; 7,078,196; 8,362,231; 8,372,968; 9,045,754; and PCT International Publication Nos. WO/2004/067736: WO/2006/097853; WO/2003/087341; WO/2000/0415661: WO/2003/080809; WO/2010/079430; WO/2010/079430: WO/2011/072246; WO/2018/057989; and WO/2017/164230, the entire contents of each of which are incorporated herein by reference.

[0131] Advantageously, the guide RNA molecules presented herein provide improved TCF4 knockout efficiency when complexed with a CRISPR nuclease in a cell relative to other guide RNA molecules. These specifically designed sequences may also be useful for identifying TCF4 target sites for other nucleotide targeting-based gene-editing or gene-silencing methods, for example, siRNA, TALENs, meganucleases or zinc-finger nucleases.

### Delivery to Cells

[0132] Any one of the compositions described herein may be delivered to a target cell by any suitable means. RNA molecule compositions of the present invention may be targeted to any cell which contains and/or expresses a TCF4 allele, such as a corneal endothelial cell or stem cell. The delivery to the cell may be performed in vivo, ex vivo, or in vitro. In some embodiments, a lentivirus like particle (LVLP) is used to deliver the composition.

[0133] Further, the nucleic acid compositions described herein may be delivered to a cell as one or more of DNA molecules, RNA molecules, ribonucleoproteins (RNP), nucleic acid vectors, or any combination thereof.

[0134] In some embodiments, the RNA molecule comprises a chemical modification. Non-limiting examples of suitable chemical modifications include 2′-O-methyl (M), 2-O-methyl, 3′phosphorothioate (MS) or 2′-O-methyl, 3′thioPACE (MSP), pseudouridine, and 1-methyl pseudo-uridine. Each possibility represents a separate embodiment of the present invention.

[0135] Any suitable viral vector system may be used to deliver nucleic acid compositions e.g., the RNA molecule compositions of the subject invention. Conventional viral and non-viral based gene transfer methods can be used to introduce nucleic acids and target tissues. In certain embodiments, nucleic acids are administered for in vivo or ex vivo gene therapy uses. Non-viral vector delivery systems include naked nucleic acid, and nucleic acid complexed with a delivery vehicle such as a liposome or poloxamer. For a review of gene therapy procedures, see Anderson (1992); Nabel & Felgner (1993); Mitani & Caskey (1993); Dillon (1993): Miller (1992); Van Brunt (1988): Vigne (1995); Kremer & Perricaudet (1995); Haddada et al. (1995); and Yu et al. (1994).

[0136] Methods of non-viral delivery of nucleic acids and/or proteins include electroporation, lipofection, microinjection, biolistics, particle gun acceleration, virosomes, liposomes, immunoliposomes, lipid nanoparticles (LNPs), polycation or lipid:nucleic acid conjugates, artificial virions, and agent-enhanced uptake of nucleic acids or can be delivered to plant cells by bacteria or viruses (e.g., Agrobacterium, Rhizobium sp. NGR234, Sinorhizoboiummeliloti, Mesorhizobium loti, tobacco mosaic virus, potato virus X, cauliflower mosaic virus and cassava vein mosaic virus). (See, e.g., Chung et al., 2006). Sonoporation using, e.g., the Sonitron 2000 system (Rich-Mar), can also be used for delivery of nucleic acids. Cationic-lipid mediated delivery of proteins and/or nucleic acids is also contemplated as an in vivo, ex vivo, or in vitro delivery method. (See Zuris et al. (2015); see also Coelho et al. (2013); Judge et al. (2006); and Basha et al. (2011)).

[0137] Non-viral vectors, such as transposon-based systems e.g. recombinant Sleeping Beauty transposon systems or recombinant PiggyBac transposon systems, may also be delivered to a target cell and utilized for transposition of a polynucleotide sequence of a molecule of the composition or a polynucleotide sequence encoding a molecule of the composition in the target cell.

[0138] Additional exemplary nucleic acid delivery systems include those provided by Amaxa® Biosystems (Cologne, Germany), Maxcyte, Inc. (Rockville, Md.), BTX Molecular Delivery Systems (Holliston, Mass.) and Copernicus Therapeutics Inc., (see, e.g., U.S. Pat. No. 6,008,336). Lipofection is described in e.g., U.S. Pat. Nos. 5,049,386, 4,946,787; and 4,897,355, and lipofection reagents are sold commercially (e.g., Transfectam™, Lipofectin™ and Lipofectamine™ RNAiMAX). Cationic and neutral lipids that are suitable for efficient receptor-recognition lipofection of polynucleotides include those disclosed in PCT International Publication Nos. WO/1991/017424 and WO/1991/016024. Delivery can be to cells (ex vivo administration) or target tissues (in vivo administration).

[0139] The preparation of lipid:nucleic acid complexes, including targeted liposomes such as immunolipid complexes, is well known to one of skill in the art (see, e.g., Crystal, Science (1995); Blaese et al., (1995); Behr et al., (1994); Remy et al. (1994); Gao and Huang (1995); Ahmad and Allen (1992); U.S. Pat. Nos. 4,186,183; 4,217,344; 4,235,871; 4,261,975; 4,485,054; 4,501,728; 4,774,085; 4,837,028; and 4,946,787).

[0140] Additional methods of delivery include the use of packaging the nucleic acids to be delivered into EnGeneIC delivery vehicles (EDVs). These EDVs are specifically delivered to target tissues using bispecific antibodies where one arm of the antibody has specificity for the target tissue and the other has specificity for the EDV. The antibody brings the EDVs to the target cell surface and then the EDV is brought into the cell by endocytosis. Once in the cell, the contents are released (See MacDiarmid et al., 2009).

[0141] The use of RNA or DNA viral based systems for viral mediated delivery of nucleic acids take advantage of highly evolved processes for targeting a virus to specific cells in the body and trafficking the viral payload to the nucleus. Viral vectors can be administered directly to patients (in vivo) or they can be used to treat cells in vitro and the modified cells are administered to patients (ex vivo). Conventional viral based systems for the delivery of nucleic acids include, but are not limited to, retroviral, lentivirus. adenoviral, adeno-associated, vaccinia and herpes simplex virus vectors for gene transfer.

[0142] The tropism of a retrovirus can be altered by incorporating foreign envelope proteins, expanding the potential target population of target cells. Lentiviral vectors are retroviral vectors that are able to transduce or infect non-dividing cells and typically produce high viral titers. Selection of a retroviral gene transfer system depends on the target tissue. Retroviral vectors are comprised of cis-acting long terminal repeats with packaging capacity for up to 6-10 kb of foreign sequence. The minimum cis-acting LTRs are sufficient for replication and packaging of the vectors, which are then used to integrate the therapeutic gene into the target cell to provide permanent transgene expression. Widely used retroviral vectors include those based upon murine leukemia virus (MuLV), gibbon ape leukemia virus (GaLV), Simian Immunodeficiency virus (SIV), human immunodeficiency virus (HIV), and combinations thereof (See, e.g., Buchschacher et al. (1992); Johann et al. (1992); Sommerfelt et al. (1990); Wilson et al. (1989); Miller et al. (1991); PCT International Publication No. WO/1994/026877A1).

[0143] At least six viral vector approaches are currently available for gene transfer in clinical trials, which utilize approaches that involve complementation of defective vectors by genes inserted into helper cell lines to generate the transducing agent.

[0144] pLASN and MFG-S are examples of retroviral vectors that have been used in clinical trials (See Dunbar et al., 1995; Kohn et al., 1995; Malech et al., 1997). PA317/pLASN was the first therapeutic vector used in a gene therapy trial (Blaese et al., 1995). Transduction efficiencies of 50% or greater have been observed for MFG-S packaged vectors. (Ellem et al., (1997); Dranoff et al., 1997).

[0145] Packaging cells are used to form virus particles that are capable of infecting a host cell. Such cells include 293 cells, which package adenovirus, AAV, and Psi-2 cells or PA317 cells, which package retrovirus. Viral vectors used in gene therapy are usually generated by a producer cell line that packages a nucleic acid vector into a viral particle. The vectors typically contain the minimal viral sequences required for packaging and subsequent integration into a host (if applicable), other viral sequences being replaced by an expression cassette encoding the protein to be expressed. The missing viral functions are supplied in trans by the packaging cell line. For example, AAV vectors used in gene therapy typically only possess inverted terminal repeat (ITR) sequences from the AAV genome which are required for packaging and integration into the host genome. Viral DNA is packaged in a cell line, which contains a helper plasmid encoding the other AAV genes, namely rep and cap, but lacking ITR sequences. The cell line is also infected with adenovirus as a helper. The helper virus promotes replication of the AAV vector and expression of AAV genes from the helper plasmid. The helper plasmid is not packaged in significant amounts due to a lack of ITR sequences. Contamination with adenovirus can be reduced by, e.g., heat treatment to which adenovirus is more sensitive than AAV. Additionally, AAV can be produced at clinical scale using baculovirus systems (see U.S. Pat. No. 7,479,554).

[0146] In many gene therapy applications, it is desirable that the gene therapy vector be delivered with a high degree of specificity to a particular tissue type. Accordingly, a viral vector can be modified to have specificity for a given cell type by expressing a ligand as a fusion protein with a viral coat protein on the outer surface of the virus. The ligand is chosen to have affinity for a receptor known to be present on the cell type of interest. For example, Han et al. (1995) reported that Moloney murine leukemia virus can be modified to express human heregulin fused to gp70. and the recombinant virus infects certain human breast cancer cells expressing human epidermal growth factor receptor. This principle can be extended to other virus-target cell pairs, in which the target cell expresses a receptor and the virus expresses a fusion protein comprising a ligand for the cell-surface receptor. For example, filamentous phage can be engineered to display antibody fragments (e.g., FAB or Fv) having specific binding affinity for virtually any chosen cellular receptor. Although the above description applies primarily to viral vectors, the same principles can be applied to nonviral vectors. Such vectors can be engineered to contain specific uptake sequences which favor uptake by specific target cells.

[0147] Gene therapy vectors can be delivered in vivo by administration to an individual patient, for example by systemic administration (e.g., intravitreal, intravenous, intraperitoneal, intramuscular, subdermal, or intracranial infusion) or topical application.

[0148] Alternatively, vectors can be delivered to cells ex vivo, such as cells explanted from an individual patient (e.g., lymphocytes, bone marrow aspirates, tissue biopsy) or universal donor hematopoietic stem cells, followed by reimplantation of the cells into a patient, optionally after selection for cells which have incorporated the vector. A non-limiting exemplary ex vivo approach may involve removal of tissue (e.g., peripheral blood, bone marrow, and spleen) from a patient for culture, nucleic acid transfer to the cultured cells (e.g., hematopoietic stem cells), followed by grafting the cells to a target tissue (e.g., bone marrow, and spleen) of the patient. In some embodiments, the stem cell or hematopoietic stem cell may be further treated with a viability enhancer.

[0149] Ex vivo cell transfection for diagnostics, research, or for gene therapy (e.g., via re-infusion of the transfected cells into the host organism) is well known to those of skill in the art. In a preferred embodiment, cells are isolated from the subject organism, transfected with a nucleic acid composition, and re-infused back into the subject organism (e.g., patient). Various cell types suitable for ex vivo transfection are well known to those of skill in the art (See, e.g., Freshney, “Culture of Animal Cells, A Manual of Basic Technique and Specialized Applications (6th edition, 2010) and the references cited therein for a discussion of how to isolate and culture cells from patients).

[0150] Vectors (e.g., retroviruses, liposomes, etc.) containing therapeutic nucleic acid compositions can also be administered directly to an organism for transduction of cells in vivo. Administration is by any of the routes normally used for introducing a molecule into ultimate contact with blood or tissue cells including, but not limited to, injection, infusion, topical application (e.g., eye drops and cream) and electroporation. Suitable methods of administering such nucleic acids are available and well known to those of skill in the art, and, although more than one route can be used to administer a particular composition, a particular route can often provide a more immediate and more effective reaction than another route. According to some embodiments, the composition is delivered via IV injection.

[0151] Vectors suitable for introduction of transgenes into cells include non-integrating lentivirus vectors. See, e.g., U.S. Patent Publication No. 2009/0117617.

[0152] Pharmaceutically acceptable carriers are determined in part by the particular composition being administered, as well as by the particular method used to administer the composition. Accordingly, there is a wide variety of suitable formulations of pharmaceutical compositions available, as described below (See, e.g., Remington's Pharmaceutical Sciences, 17th ed., 1989).

Examples of RNA Guide Sequences which Specifically Target Alleles of TCF4 Gene

[0153] Although a large number of guide sequences can be designed to target the TCF4 gene, the nucleotide sequences described in Table 1 and are identified by SEQ ID NOs: 1-2325 were specifically selected to effectively implement the methods set forth herein.

[0154] Table 1 shows guide sequences designed for use as described in the embodiments above to associate with target sequences of the TCF4 gene. Each engineered guide molecule is further designed such as to associate with a target genomic DNA sequence of interest that lies next to a protospacer adjacent motif (PAM), e.g., a PAM matching the sequence NGG or NAG, where “N” is any nucleobase. The guide sequences were designed to work in conjunction with one or more different CRISPR nucleases, including, but not limited to, e.g. SpCas9WT (PAM SEQ: NGG), SpCas9.VQR.1 (PAM SEQ: NGAN). SpCas9.VQR.2 (PAM SEQ: NGNG). SpCas9 EQR (PAM SEQ: NGAG). SpCas9.VRER (PAM SEQ: NGCG), SaCas9WT (PAM SEQ: NNGRRT), SpRY (PAM SEQ: NRN or NYN), NmCas9WT (PAM SEQ: NNNNGATT), Cpf1 (PAM SEQ: TTTV), JeCas9WT (PAM SEQ NNN VRYM), OMNIT-50 (PAM SEQ: NGG), OMNI-79 (PAM SEQ NGG), OMNI-103 (PAM SEQ: NNRACT), OMNI-159 (NNNNCMAN), or OMNI-124 (PAM SEQ: NNGNRMNN). RNA molecules of the present invention are each designed to form complexes in conjunction with one or more different CRISPR nucleases and designed to target polynucleotide sequences of interest utilizing one or more different PAM sequences respective to the CRISPR nuclease utilized.

[0155] Additional description of OMNI CRISPR nucleases is provided in PCT International Application Publication No. WO 2023/019269 A2, PCT International Application Publication Nos. WO 2022/170199 A2 and WO 2023/107946 A2, U.S. Pat. No. 11,666,641 B2 and PCT International Application Publication Nos. WO 2020/223514 A2, WO 2022/098693 A1, and WO 2023/019263 A1, U.S. Application Publication No. 2023/0122086 A1 and PCT International Application Publication Nos. WO 2021/248016 A2 and WO 2023/102407 A2, PCT International Application Publication No. WO 2022/087135 A1, and PCT International Application Publication No. WO 2022/226215 A1, the contents of each of which are hereby incorporated by reference.

[0156] As used herein, the following nucleotide identifiers are used to represent a referenced nucleotide base(s):

| Nucleotide | | | | |
|---|---|---|---|---|
| reference | Base(s) represented | | | |
| A | A | | | |
| C | | C | | |
| G | | | G | |
| T | | | | T |
| W | A | | | T |
| S | | C | G | |
| M | A | C | | |
| K | | | G | T |
| R | A | | G | |
| Y | | C | | T |
| B | | C | G | T |
| D | A | | G | T |
| H | A | C | | T |
| V | A | C | G | |
| N | A | C | G | T |

TABLE 1
Guide sequences designed to associate with specific TCF4 gene targets

| | SEQ ID NOS: | SEQ ID NOS: | SEQ ID NOS: |
|---|---|---|---|
| | of 20 base | of 21 base | of 22 base |
| Target | guides | guides | guides |
| 18:55585911-55586155 | 1-405 | 406-809 | 810-1215 |
| Intron 3, downstream to the expanded | | | |
| region | | | |
| 18:55586227-55586483 | 1216-1604 | 1605-1958 | 1959-2325 |
| Intron 3, upstream to the expanded | | | |
| region | | | |

The indicated locations listed in column 1 of the Table 1 are based on gnomAD v3 database and UCSC Genome Browser assembly ID: hg38, Sequencing/Assembly provider ID: Genome Reference Consortium Human GRCh38.p12 (GCA_000001405.27). Assembly date: December 2013 initial release; December 2017 patch release 12. The SNP details are indicated by the listed SNP ID Nos. (“rs numbers”), which are based on the NCBI 2018 database of Single Nucleotide Polymorphisms (dbSNP)). The indicated DNA mutations are associated with Transcript Consequence NM_001083962 as obtained from NCBI RefSeq genes

[0157] Examples are provided below to facilitate a more complete understanding of the invention. The following examples illustrate the exemplary modes of making and practicing the invention. However, the scope of the invention is not limited to specific embodiments disclosed in these Examples, which are for purposes of illustration only.

### EXPERIMENTAL DETAILS

### Example 1: TCF4 Guide Sequence Portion Targeting Analysis

[0158] Guide sequences comprising 17-50 contiguous nucleotides containing nucleotides in the sequence set forth in any one of SEQ ID NOs: 1-2325 are screened for high on target activity using a CRISPR nuclease human cells. On target activity is determined by DNA capillary electrophoresis analysis.

### Example 2: TCF4 Expanded Repeat Excision

[0159] Trinucleotide repeat CTG18.1 is located in intron 3 of the TCF4 gene. In up to 75% of FECD patients, at least one TCF4 allele with CTG18.1 expansion (i.e. over 50 copies of “CTG”) is present. In order to perform excision of the repeat for use in FECD treatment, four (4) different sgRNAs were designed up and downstream to the repeat (see FIG. 1), and the activity of each sgRNA was tested with SpCas9 in U2OS cells.

[0160] Briefly, 2×10⁵ cells were mixed with preassembled RNPs, which were composed of 105 pmole SpCas9 protein (Alt-R® S.p. Cas9 Nuclease V3, 1081059, IDT) and 124 pmole sgRNA (Alt-R™ CRISPR-Cas9 sgRNA. IDT), and 100 pmole of electroporation enhancer (Alt-R® Cas9 Electroporation Enhancer, 1075916). The cells were then electroporated using SE cell 4D-nucleofector X Kit S (V4XC-1032, Lonza) by applying the DN-100 program. A fraction of the cells was harvested 72 hours post-electroporation and genomic DNA was extracted to measure on-target activity by next generation sequencing (NGS). According to NGS analysis, all eight (8) guides demonstrated very high activity and editing was observed in over 90% of the cells (FIG. 2).

[0161] In order to see that elimination of the repeat area does not affect TCF4 expression, excision of the repeat area with different guide combinations (upstream and downstream to the repeat) was performed in U2OS cells and the expression of TCF4 was tested using qRT-PCR and western blot. Briefly, 2×10⁵ cells were mixed with preassembled RNPs composed of 105 pmole SpCas9 protein (Alt-R® S.p. Cas9 Nuclease V3, 1081059, IDT) and 124 pmole of each sgRNA (Alt-R™ CRISPR-Cas9 sgRNA. IDT). Upon RNP formation, the indicated RNP combinations were mixed with 100 pmole of electroporation enhancer (Alt-RC Cas9 Electroporation Enhancer, 1075916) and electroporated using SE cell 4D-nucleofector X Kit S (V4XC-1032, Lonza) by applying the DN-100 program. Cells were allowed to grow for at least seven (7) days in order to obtain enough cells for genomic DNA. RNA and protein extraction. Upon RNA extraction, cDNA was synthesized, and qRT-PCR was performed using fast SYBR and specific primers to the exon 11-exon 12 junction of TCF4 (FIG. 3). For western blot, cells were lysed with RIPA buffer and 40 μg of total protein was separated using SDS-PAGE. A specific TCF4 antibody (ab217668, Abcam) was used to detect protein levels of TCF4. GAPDH was used as a loading control (FIG. 4).

[0162] As shown, only excision with gRNA2+gRNA5 and gRNA2+gRNA7 reduced the levels of mRNA and protein of TCF4.

[0163] In order to validate the excision levels, a ddPCR assay (QX200. BioRad) was designed with a probe specific to the excision pattern of g4+g6 so that only the excised fragments can give a positive signal (FAM). RPP30 was used as an endogenous control (HEX). The results show that the excision rate was 42% for the g4+g6 combination (FIG. 5).

[0164] A summary table of the tested TCF4 guide sequence portions is shown below:

| Name | Guide Sequence Portion |
|---|---|
| hTCF4_g1_20 bp_II | CUCUUCUUCGACGUAUCUAG (SEQ ID NO: 178) |
| hTCF4_g2_20 bp_II | CAGGCAAAUCCUAUACGAGA (SEQ ID NO: 405) |
| hTCF4_g3_20 bp_II | GCAUUUAUUUCGACCCUAAU (SEQ ID NO: 238) |
| hTCF4_g4_20 bp_II | UCCAAAAGAAGGUCUAGAAG (SEQ ID NO: 308) |
| hTCF4_g5_20 bp_II | UGGAGUUUUACGGCUGUACU (SEQ ID NO: 1541) |
| hTCF4_g6_20 bp_II | GCCCCACUUGGAAGGCGGUU (SEQ ID NO: 1436) |
| hTCF4_g7_20 bp_II | UAACUAGGAGGUAAGAUGUA (SEQ ID NO: 1216) |
| hTCF4_g8_20 bp_II | UUGGUAAAUUUCGUAGUCGU (SEQ ID NO: 1575) |

### Example 3: Guide Sequence Portion Screening

[0165] Additional guides were screened using several OMNI CRISPR nucleases in HeLa cells. This is a proof of concept showing that guides can form double-stranded breaks upstream and downstream to the TCF4 repeat expansion.

[0166] A summary table of the additionally tested TCF4 guide sequence portions is shown below. Briefly, sgRNA activity targeting TCF4 intron 3 around the expanded repeat CTG18.1 locus is shown. In order to test activity of each guide with the indicated nuclease, HeLa cells were transfected with both a nuclease and the sgRNA and activity was measured three (3) days after transfection using next-generation sequencing (NGS).

| | | | | | Upstream/ |
|---|---|---|---|---|---|
| | | | | | Downstream |
| | | | | | to the |
| CRISPR | Guide | Guide Sequence | | % Max | Repeat |
| Nuclease | Name | Portion | PAM | Edits | Expansion |
| OMNI-110 | g128 | AGCAAAGGGATGG | AAGTACAG | 54.1 | Upstream |
| | | AGAAGGACC (SEQ | | | |
| | | ID NO: 2026) | | | |
| | g189 | GTCCCAGACATGTC | GAATTCAT | 71.52 | Upstream |
| | | AGGAGAAT (SEQ ID | | | |
| | | NO: 2200) | | | |
| | g51 | TCTGACTCAGGGA | TTATCCAC | 42.4 | Downstream |
| | | AGGTGTGCA (SEQ | | | |
| | | ID NO: 1141) | | | |
| | g183 | GGGAAGGTGTGCA | AGATACGT | 68.7666667 | Downstream |
| | | TTATCCACT (SEQ | | | |
| | | ID NO: 1078) | | | |
| | g185 | CTTTCTGCTTGTTG | CCATTCGT | 60.7533333 | Downstream |
| | | CACTTTCT (SEQ ID | | | |
| | | NO: 1007) | | | |
| OMNI-231 | g180 | GGATCAGCACAAA | GACACACT | 60.02 | Upstream |
| | | GCGGAACTT (SEQ | | | |
| | | ID NO: 2180) | | | |
| | g181 | TTCGTAGTCGTAGG | AAAGCGGA | 58.5633333 | Upstream |
| | | ATCAGCAC (SEQ ID | | | |
| | | NO: 2285) | | | |
| | g67 | GTTTGGTGTAAGAT | AAAGCAAA | 58.3766667 | Upstream |
| | | GCATTTGT (SEQ ID | | | |
| | | NO: 2212) | | | |
| | g14 | GAGAAGGACCAAG | AAAACTCC | 42.2666667 | Upstream |
| | | TACAGCCGT (SEQ | | | |
| | | ID NO: 2151) | | | |
| OMNI-269 | g61 | GCTGATCCTACGAC | TTACCAAA | 80.0033333 | Upstream |
| | | TACGAAAT (SEQ ID | | | |
| | | NO: 2167) | | | |
| | g67 | GTTTGGTGTAAGAT | AAAGCAAA | 58.025 | Upstream |
| | | GCATTTGT (SEQ ID | | | |
| | | NO: 2212) | | | |
| | g170 | AATCCACAAAACA | AATCCAAA | 49.5266667 | Upstream |
| | | CACAAATAA (SEQ | | | |
| | | ID NO: 2325) | | | |
| | g59 | ACAGCCGTAAAAC | GTGTCAAG | 54.49 | Upstream |
| | | TCCACAAGT (SEQ | | | |
| | | ID NO: 2007) | | | |
| | g66 | GAATCCACAAAAC | AAATCCAA | 60.91 | Upstream |
| | | ACACAAATA (SEQ | | | |
| | | ID NO: 2144) | | | |
| | g49 | CTAGATACGTCGA | AAACCAAT | 70.3766667 | Downstream |
| | | AGAAGAGGG (SEQ | | | |
| | | ID NO: 973) | | | |
| | g41 | TTCCCTGAGTCAGA | AAAGCAAA | 69.1666667 | Downstream |
| | | GCCTGCAA (SEQ ID | | | |
| | | NO: 1173) | | | |
| OMNI-129 | g141 | CCGCTTTGTGCTGA | CTACGAAA | 54.31 | Upstream |
| | | TCCTACGA (SEQ ID | | | |
| | | NO: 2103) | | | |
| OMNI-136 | g41 | TTCCCTGAGTCAGA | AAAGCAAA | 55.0233333 | Upstream |
| | | GCCTGCAA (SEQ ID | | | |
| | | NO: 1173) | | | |
| OMNI-169 | g131 | AGGGATGGAGAAG | CAGCCGTA | 53.5233333 | Upstream |
| | | GACCAAGTA (SEQ | | | |
| | | ID NO: 2036) | | | |
| OMNI-286 | g67 | GTTTGGTGTAAGAT | AAAGCAAA | 67.87 | Upstream |
| | | GCATTTGT (SEQ ID | | | |
| | | NO: 2212) | | | |
| OMNI-159 | g40 | GCACACCTTCCCTG | CCTGCAAA | 48.95 | Downstream |
| | | AGTCAGAG (SEQ ID | | | |
| | | NO: 1040) | | | |
| | g42 | AAGCAAAGGAACG | AGTGCAAC | 42.99 | Downstream |
| | | AATGGAGAA (SEQ | | | |
| | | ID NO: 830) | | | |
| | g43 | CAAAGGAACGAAT | GCAACAAG | 52.49 | Downstream |
| | | GGAGAAAGT (SEQ | | | |
| | | ID NO: 907) | | | |
| | g49 | CTAGATACGTCGA | AAACCAAT | 41.35 | Downstream |
| | | AGAAGAGGG (SEQ | | | |
| | | ID NO: 973) | | | |
| | g59 | ACAGCCGTAAAAC | GTGTCAAG | 43.9 | Upstream |
| | | TCCACAAGT (SEQ | | | |
| | | ID NO: 2007) | | | |
| | g67 | GTTTGGTGTAAGAT | AAAGCAAA | 41.29 | Upstream |
| | | GCATTTGT (SEQ ID | | | |
| | | NO: 2212) | | | |
| OMNI-103 | g10 | GCCTAGGGCTACG | AAAACTTC | 49.21 | Downstream |
| | | TTTCCTGGC (SEQ | | | |
| | | ID NO: 1053) | | | |
| | g13 | GCTTTACAAATGCA | CAAACTCA | 68.1366667 | Upstream |
| | | TCTTACAC (SEQ ID | | | |
| | | NO: 2170) | | | |
| | g14 | GAGAAGGACCAAG | AAAACTCC | 59.29 | Upstream |
| | | TACAGCCGT (SEQ | | | |
| | | ID NO: 2151) | | | |
| | g15 | AGTTCCGCTTTGTG | ACGACTAC | 52.4366667 | Upstream |
| | | CTGATCCT (SEQ ID | | | |
| | | NO: 2041) | | | |
| | g17 | CAATCCAAAGCAT | AAAACTTT | 62.5133333 | Upstream |
| | | CATTAGCTT (SEQ | | | |
| | | ID NO: 2319) | | | |
| | g18 | ATTAGCTTAAAACT | ACAACTGG | 62.0233333 | Upstream |
| | | TTAAAGAG (SEQ ID | | | |
| | | NO: 2320) | | | |
| | g19 | TAGGGAATTGAAG | AAAACTCA | 58.61 | Upstream |
| | | GCCAGTAAT (SEQ | | | |
| | | ID NO: 2321) | | | |
| | g20 | AGTCGTAGGATCA | GGAACTTG | 56.5366667 | Upstream |
| | | GCACAAAGC (SEQ | | | |
| | | ID NO: 2039) | | | |
| | g21 | TACATCTTTTCCTA | AAAACTAG | 54.4133333 | Upstream |
| | | GGATTCTT (SEQ ID | | | |
| | | NO: 2322) | | | |
| | g23 | CCCCTAAAACTAA | AAAACTTG | 86.21 | Upstream |
| | | ACCACCCCT (SEQ | | | |
| | | ID NO: 2323) | | | |
| | g24 | GAAAGCAAAAATA | AAAACTAA | 58.1333333 | Upstream |
| | | GACACCCCT (SEQ | | | |
| | | ID NO: 2324) | | | |
| OMNI-127 | g26 | TTATCAAGATTCAG | CCAGCAGC | 44.7166667 | Downstream |
| | | GTTGGAGG (SEQ ID | | | |
| | | NO: 1214) | | | |
| | g27 | TCAAGATTCAGGTT | GCAGCCTC | 59.2466667 | Downstream |
| | | GGAGGCCA (SEQ ID | | | |
| | | NO: 1215) | | | |
| | g33 | AAGGGATGGAGAA | ACAGCCGT | 54.515 | Upstream |
| | | GGACCAAGT (SEQ | | | |
| | | ID NO: 1986) | | | |
| OMNI-50 | g4 | TCTCCAAAAGAAG | AGGAGGAG | 51.09 | downstream |
| | | GTCTAGAAG (SEQ | | | |
| | | ID NO: 1138) | | | |
| | g195 | AAATCCAAACCGC | GGGGCTCT | 52.92 | upstream |
| | | CTTCCAAGT (SEQ | | | |
| | | ID NO: 1970) | | | |

[0167] A table describing the amino acid sequences of the CRISPR nucleases used and the sequences of their sgRNA scaffolds is shown below:

| CRISPR Nuclease | sgRNA Scaffold Sequence |
|---|---|
| OMNI-110 | GUUGUGAUUCGCUUCCGAAAGCAAGCGAAUCACAAUAAGGAUUA |
| (SEQ ID NO: 2331) | UUCCGUUGUGAAAACAUUUAAGUCGGGCCUCCUUCGGUUGGCUC |
| | GGCUUUUUUU (SEQ ID NO: 2342) |
| OMNI-231 | GUUUGAGAGUAAUGUAGGAAAUUACAUUACAAGUUCAAAUAACG |
| (SEQ ID NO: 2332) | AUUUAAUCGAAACCACCUUUUUAGGUACUGCGGUUGCAGUUUUU |
| | U (SEQ ID NO: 2343) |
| OMNI-269 | GCUAUAGUUUCCUUUCGAAGAAAUUCGAAACGUUACUAUAGUAA |
| (SEQ ID NO: 2333) | GAAAUUUUCGAAAAGUUCUGCCUAAUACUAUUAUGUAUUAGGCA |
| | UCUUUUUU (SEQ ID NO: 2344) |
| OMNI-129 | GUUGUAGUUCCCUAAUGUUGAAAGACAUUAGGUUACUGCGAUCA |
| (SEQ ID NO: 2334) | GGCAGUAUGCCUCAGAGCUCCGCCCUAACCACGUUUUGUGGUUG |
| | GGGCGUCUUUGCAUUUUUU (SEQ ID NO: 2345) |
| OMNI-136 | GUUGUAGUUCCCUGUUAAUGAAAAUUUUCGGGUUACUAUGAUAA |
| (SEQ ID NO: 2335) | GGUAGAACACCGAAAAGCUCUAACGCCUUGCCAUUUGGUGAGGC |
| | GUUAUCUUUUUU (SEQ ID NO: 2346) |
| OMNI-169 | GUUGUGAAUUGCUUUCAAAGAAAUGUGAAAGCUUUUCACAAUAA |
| (SEQ ID NO: 2336) | GGCUAUAAGCCACAGAUCUUUCUAACUCCUGCGUACUCCGUGGG |
| | AGUAUUUUUU (SEQ ID NO: 2347) |
| OMNI-286 | GUUGUAGUUCCCUAUUUAUGAAAGUAAAUAGGUUACUACAAUAA |
| (SEQ ID NO: 2337) | GGCCCUUGCGCAAGCAUGGUGCCGCAACUGGAAGGUGCUGUGCG |
| | AGUCACGGCACUUUUUU (SEQ ID NO: 2348) |
| OMNI-159 | GUUGUAGUUCCCUAUUUGUGAAAACAAUUAGGUUACUAUGAUAA |
| (SEQ ID NO: 2338) | GGUAGUAUACCGCAAAGCUCUAACGCCCCGUCUUUGACGGGGCG |
| | UUAUCUUUUUU (SEQ ID NO: 2349) |
| OMNI-103 | GUUUGAGAGUAGUGUAAGAAAUUACACUACAAGUUCAAAUAAAA |
| (SEQ ID NO: 2339) | AUUUAUUCAAAUCCAUUUGCUACAUUGUGUAGAAUUUAAAGAUC |
| | UGGCAACAGAUCUUUUUUU (SEQ ID NO: 2350) |
| OMNI-127 | GUUUUGUUACCAUAUGGAUGAAAAUCUAUAUGACCUAACAAAAC |
| (SEQ ID NO: 2340) | AAGGGUUUAUCCCGGAUUCGGCUCCUUUAUAGGAGCCUUUUUU |
| | (SEQ ID NO: 2351) |
| OMNI-50 | GUUUGAGAGUUAUGGAAACAUGACGAGUUCAAAUAAAAAU |
| (SEQ ID NO: 2341) | UUAUUCAAACCGCCUAUUUAUAGGCCGCAGAUGUUCUGCAU |
| | UAUGCUUGCUAUUGCAAGCUUUUUU (SEQ ID NO: 2352) |

### Example 4: Excision Evaluation—Transfection in HeLa Cells

[0168] In order to measure the excision levels of the CTG18.1 expanded repeat, excision levels were examined using droplet digital PCR (ddPCR) for two different excising compositions. Briefly, HeLa cells were transfected with the a nuclease and two sgRNAs using JetOptimus. Each sgRNA was also transfected separately in order to assess activity of each guide in this specific experiment. Cells were harvested for next-generation sequencing (NGS) three (3) days after transfection (FIG. 6A), and for genomic extraction and ddPCR 10 days after transfection (FIG. 6B). mCherry was used as a reporter for transfection efficiency and quantified using flow cytometry. Excision was measured using EvaGreen “gain of signal” assay (QX200, BioRad), with primers around the excision area. When no excision occurs, the amplified amplicon is too long to be detected using ddPCR (above 200 bp) and the signal appears only after excision, where the amplified sequence is below 200 bp. The signal was normalized to the RPP30 housekeeping gene. The results showed that for OMNI-103 nuclease, sgRNA10 and sgRNA13 displayed 34.77% and 50.89% editing respectively, and 8.5% excision; for OMNI-110 nuclease, sgRNA183 and sgRNA189 displayed 39.33% and 36.05% editing and 4.89% excision.

[0169] The goal was to perform excision of the expanded repeat without affecting TCF4 expression, since it is a transcription factor that controls central cellular functions. In order to determine whether the excision affects the expression of TCF4, TCF4 protein levels were measured after excision with the indicated compositions, 14 days after transfection. For western blot, cells were lysed with RIPA buffer and 40 μg of total protein were loaded on an SDS page. A specific antibody was used in order to detect protein levels of TCF4 (ab217668, abcam) and GAPDH was used as a loading control. No effect on TCF4 expression was observed (FIG. 7).

### Example 5: Excision Evaluation—Infection with LVLPs in U2OS Cells

[0170] Excision using Lentiviral Like Particles (LVLPs) was also tested since this is a feasible delivery system to the corneal endothelial cells. LVLPs are viral particles which contain lentiviral envelope, but they do not contain any viral genetic material—only the sgRNA, which is bound to the structural viral proteins trough aptamer binding proteins (ABP), and the nuclease protein that is recruited by the guide. Upon infection of target cells, the particle can release its RNP content, and transient expression and activity of the released RNP is achieved (Lyu et al., Nucleic Acids Research, 2019).

[0171] OMNI-50 nuclease is known to be highly active as RNP and it is also established to be efficiently packed in LVLPs. In order to test the activity of OMNI-50, we packed either upstream or downstream RNP composition in LVLPs and tested the editing levels of each sgRNA separately (FIG. 8A) in U2OS cells. sgRNA4 (downstream) and sgRNA195 (upstream) displayed 53.0% and 84.43% editing, respectively, three (3) days after infection (FIG. 8B).

[0172] In order to measure excision levels of the expanded repeat area, cells were infected with either the mix of both upstream and downstream LVLP compositions or packed both compositions in the same LVLP product (all in one). In both cases, the excision levels were 15% 18 days after infection (FIG. 8B).

[0173] 21 days post infection, the above excised cells were subjected to RNA extraction, cDNA was synthesized, and qRT-PCR was performed using fast SYBR and specific primers to the exon11-exon12 junction of TCF4 (FIG. 9). No significant effect was observed on mRNA levels of TCF4 after excision.

### REFERENCES

[0174] 1. Ahmad and Allen (1992) “Antibody-mediated Specific Binging and Cytotoxicity of Liposome-entrapped Doxorubicin to Lung Cancer Cells in Vitro”, Cancer Research 52:4817-20.
[0175] 2. Anderson (1992) “Human gene therapy”, Science 256:808-13.
[0176] 3. Anzalone et al. (2019) “Search-and-replace genome editing without double-strand brakes or donor DNA”. Nature 576, 149-157.
[0177] 4. Basha et al. (2011) “Influence of Cationic Lipid Composition on Gene Silencing Properties of Lipid Nanoparticle Formulations of siRNA in Antigen-Presenting Cells”, Mol. Ther. 19(12):2186-200.
[0178] 5. Behr (1994) Gene transfer with synthetic cationic amphiphiles: Prospects for gene therapy”, Bioconjugate Chem 5:382-89.
[0179] 6. Blaese (1995) “Vectors in cancer therapy: how will they deliver”, Cancer Gene Ther. 2:291-97.
[0180] 7. Blaese et al. (1995) “T lymphocyte-directed gene therapy for ADA-SCID: initial trial results after 4 years”, Science 270(5235):475-80.
[0181] 8. Buchschacher and Panganiban (1992) “Human immunodeficiency virus vectors for inducible expression of foreign genes”, J. Virol. 66:2731-39.
[0182] 9. Burstein et al. (2017) “New CRISPR-Cas systems from uncultivated microbes”, Nature 542:237-41.
[0183] 10. Chang and Wilson (1987) “Modification of DNA ends can decrease end-joining relative to homologous recombination in mammalian cells”, Proc. Natl. Acad. Sci. USA 84:4959-4963.
[0184] 11. Chung et al. (2006) “Agrobacterium is not alone: gene transfer to plants by viruses and other bacteria”, Trends Plant Sci. 11(1):1-4.
[0185] 12. Coelho et al. (2013) “Safety and efficacy of RNAi therapy for transthyretin amyloidosis” N. Engl. J. Med. 369, 819-829.
[0186] 13. Collias and Beisel (2021) “CRISPR technologies and the search for the PAM-free nuclease”, Nature Communications 12, 555.
[0187] 14. Crystal (1995) “Transfer of genes to humans: early lessons and obstacles to success”, Science 270(5235):404-10.
[0188] 15. Dillon (1993) “Regulation gene expression in gene therapy” Trends in Biotechnology 11(5):167-173.
[0189] 16. Dranoff et al. (1997) “A phase I study of vaccination with autologous, irradiated melanoma cells engineered to secrete human granulocyte macrophage colony stimulating factor”, Hum. Gene Ther. 8(1): 111-23.
[0190] 17. Dunbar et al. (1995) “Retrovirally marked CD34-enriched peripheral blood and bone marrow cells contribute to long-term engraftment after autologous transplantation”, Blood 85:3048-57.
[0191] 18. Ellem et al. (1997) “A case report: immune responses and clinical course of the first human use of granulocyte/macrophage-colony-stimulating-factor-transduced autologous melanoma cells for immunotherapy”, Cancer Immunol Immunother 44:10-20.
[0192] 19. Gao and Huang (1995) “Cationic liposome-mediated gene transfer” Gene Ther. 2(10):710-22.
[0193] 20. Haddada et al. (1995) “Gene Therapy Using Adenovirus Vectors”, in: The Molecular Repertoire of Adenoviruses III: Biology and Pathogenesis, ed. Doerfler and Bohm, pp. 297-306.
[0194] 21. Han et al. (1995) “Ligand-directed retro-viral targeting of human breast cancer cells”, Proc Natl Acad Sci U.S.A. 92(21):9747-51.
[0195] 22. Hu et al. (2018) “Evolved Cas9 variants with broad PAM compatibility and high DNA specificity”, Nature 556(7699):57-63.
[0196] 23. Jinek et al. (2012) “A programmable dual-RNA-guided DNA endonuclease in adaptive bacterial immunity,” Science 337(6096):816-21.
[0197] 24. Johan et al. (1992) “GLVR1, a receptor for gibbon ape leukemia virus, is homologous to a phosphate permease of Neurospora crassa and is expressed at high levels in the brain and thymus”, J Virol 66(3):1635-40.
[0198] 25. Judge et al. (2006) “Design of noninflammatory synthetic siRNA mediating potent gene silencing in vivo”, Mol Ther. 13(3):494-505.
[0199] 26. Kohn et al. (1995) “Engraftment of gene-modified umbilical cord blood cells in neonates with adenosine deaminase deficiency”, Nature Medicine 1:1017-23.
[0200] 27. Kremer and Perricaudet (1995) “Adenovirus and adeno-associated virus mediated gene transfer”, Br. Med. Bull. 51(1):31-44.
[0201] 28. Lyu et al. (2019) “Delivering Cas9/sgRNA ribonucleoprotein (RNP) by lentiviral capsid based bionanoparticles for efficient ‘hit-and-run’ genome editing”, Nucleic Acids Research, 47(17):e99
[0202] 29. Macdiarmid et al. (2009) “Sequential treatment of drug-resistant tumors with targeted minicells containing siRNA or a cytotoxic drug”, Nat Biotechnol. 27(7):643-51.
[0203] 30. Malech et al. (1997) “Prolonged production of NADPH oxidase-corrected granulocytes after gene therapy of chronic granulomatous disease”, PNAS 94(22):12133-38.
[0204] 31. Miller et al. (1991) “Construction and properties of retrovirus packaging cells based on gibbon ape leukemia virus”, J Virol. 65(5):2220-24.
[0205] 32. Miller (1992) “Human gene therapy comes of age”, Nature 357:455-60.
[0206] 33. Mitani and Caskey (1993) “Delivering therapeutic genes—matching approach and application”, Trends in Biotechnology 11(5):162-66.
[0207] 34. Nabel and Felgner (1993) “Direct gene transfer for immunotherapy and immunization”, Trends in Biotechnology 11(5):211-15.
[0208] 35. Nishimasu et al. (2018) “Engineered CRISPR-Cas9 nuclease with expanded targeting space”, Science 361(6408):1259-1262.
[0209] 36. Remy et al. (1994) “Gene Transfer with a Series of Lipophilic DNA-Binding Molecules”, Bioconjugate Chem. 5(6):647-54.
[0210] 37. Sentmanat et al. (2018) “A Survey of Validation Strategies for CRISPR-Cas9 Editing”, Scientific Reports 8:888. doi:10.1038/s41598-018-19441-8.
[0211] 38. Sommerfelt et al. (1990) “Localization of the receptor gene for type D simian retroviruses on human chromosome 19”, J. Virol. 64(12):6214-20.
[0212] 39. Van Brunt (1988) “Molecular framing: transgenic animals as bioactors” Biotechnology 6:1149-54.
[0213] 40. Vigne et al. (1995) “Third-generation adenovectors for gene therapy”, Restorative Neurology and Neuroscience 8(1,2): 35-36.
[0214] 41. Walton et al. (2020) “Unconstrained genome targeting with near-PAMless engineered CRISPR-Cas9 variants”, Science 368(6488):290-296.
[0215] 42. Weissman and Kariko (2015) “mRNA:Fulfilling the promise of gene therapy”, Molecular Therapy (9):1416-7.
[0216] 43. Wilson et al. (1989) “Formation of infectious hybrid virion with gibbon ape leukemia virus and human T-cell leukemia virus retroviral envelope glycoproteins and the gag and pol proteins of Moloney murine leukemia virus”, J. Virol. 63:2374-78.
[0217] 44. Yu et al. (1994) “Progress towards gene therapy for HIV infection”, Gene Ther. 1(1):13-26.
[0218] 45. Zetsche et al. (2015) “Cpf1 is a single RNA-guided endonuclease of a class 2 CRISPR-Cas system” Cell 163(3):759-71.
[0219] 46. Zuris et al. (2015) “Cationic lipid-mediated delivery of proteins enables efficient protein based genome editing in vitro and in vivo” Nat Biotechnol. 33(1):73-80.

The application's sequence listing, which the Patent Office published only in electronic form, follows.

SEQUENCE LISTING (2352 sequences)

SEQ ID NO: 1 - RNA, 20 nt, synthetic construct
  source 1..20: mol_type = other RNA
aaaaagcaaaggaacgaatg

SEQ ID NO: 2 - RNA, 20 nt, synthetic construct
  source 1..20: mol_type = other RNA
aaaacttccgaaagccattt

SEQ ID NO: 3 - RNA, 20 nt, synthetic construct
  source 1..20: mol_type = other RNA
aaaagaaggtctagaagagg

SEQ ID NO: 4 - RNA, 20 nt, synthetic construct
  source 1..20: mol_type = other RNA
aaaagcaaaggaacgaatgg

SEQ ID NO: 5 - RNA, 20 nt, synthetic construct
  source 1..20: mol_type = other RNA
aaacgtagccctaggcaggc

SEQ ID NO: 6 - RNA, 20 nt, synthetic construct
  source 1..20: mol_type = other RNA
aaacttccgaaagccatttc

SEQ ID NO: 7 - RNA, 20 nt, synthetic construct
  source 1..20: mol_type = other RNA
aaagaaggtctagaagagga

SEQ ID NO: 8 - RNA, 20 nt, synthetic construct
  source 1..20: mol_type = other RNA
aaagcaaaggaacgaatgga

SEQ ID NO: 9 - RNA, 20 nt, synthetic construct
  source 1..20: mol_type = other RNA
aaagccatttctccaaaaga

SEQ ID NO: 10 - RNA, 20 nt, synthetic construct
  source 1..20: mol_type = other RNA
aaagctgcctgcctagggct

SEQ ID NO: 11 - RNA, 20 nt, synthetic construct
  source 1..20: mol_type = other RNA
aaaggaacgaatggagaaag

SEQ ID NO: 12 - RNA, 20 nt, synthetic construct
  source 1..20: mol_type = other RNA
aaagggggctgcaaagctgc

SEQ ID NO: 13 - RNA, 20 nt, synthetic construct
  source 1..20: mol_type = other RNA
aaagtgcaacaagcagaaag

SEQ ID NO: 14 - RNA, 20 nt, synthetic construct
  source 1..20: mol_type = other RNA
aaatggctttcggaagtttt

SEQ ID NO: 15 - RNA, 20 nt, synthetic construct
  source 1..20: mol_type = other RNA
aacaagcagaaagggggctg

SEQ ID NO: 16 - RNA, 20 nt, synthetic construct
  source 1..20: mol_type = other RNA
aacgaatggagaaagtgcaa

SEQ ID NO: 17 - RNA, 20 nt, synthetic construct
  source 1..20: mol_type = other RNA
aacgtagccctaggcaggca

SEQ ID NO: 18 - RNA, 20 nt, synthetic construct
  source 1..20: mol_type = other RNA
aacttccgaaagccatttct

SEQ ID NO: 19 - RNA, 20 nt, synthetic construct
  source 1..20: mol_type = other RNA
aagaagagggaaaccaatta

SEQ ID NO: 20 - RNA, 20 nt, synthetic construct
  source 1..20: mol_type = other RNA
aagaaggtctagaagaggag

SEQ ID NO: 21 - RNA, 20 nt, synthetic construct
  source 1..20: mol_type = other RNA
aagagggaaaccaattaggg

SEQ ID NO: 22 - RNA, 20 nt, synthetic construct
  source 1..20: mol_type = other RNA
aagcaaaggaacgaatggag

SEQ ID NO: 23 - RNA, 20 nt, synthetic construct
  source 1..20: mol_type = other RNA
aagcagaaagggggctgcaa

SEQ ID NO: 24 - RNA, 20 nt, synthetic construct
  source 1..20: mol_type = other RNA
aagccatttctccaaaagaa

SEQ ID NO: 25 - RNA, 20 nt, synthetic construct
  source 1..20: mol_type = other RNA
aagctgcctgcctagggcta

SEQ ID NO: 26 - RNA, 20 nt, synthetic construct
  source 1..20: mol_type = other RNA
aaggaacgaatggagaaagt

SEQ ID NO: 27 - RNA, 20 nt, synthetic construct
  source 1..20: mol_type = other RNA
aagggggctgcaaagctgcc

SEQ ID NO: 28 - RNA, 20 nt, synthetic construct
  source 1..20: mol_type = other RNA
aaggtctagaagaggaggag

SEQ ID NO: 29 - RNA, 20 nt, synthetic construct
  source 1..20: mol_type = other RNA
aaggtgtgcattatccacta

SEQ ID NO: 30 - RNA, 20 nt, synthetic construct
  source 1..20: mol_type = other RNA
aagtgcaacaagcagaaagg

SEQ ID NO: 31 - RNA, 20 nt, synthetic construct
  source 1..20: mol_type = other RNA
aagttttgccaggaaacgta

SEQ ID NO: 32 - RNA, 20 nt, synthetic construct
  source 1..20: mol_type = other RNA
aatgcacaccttccctgagt

SEQ ID NO: 33 - RNA, 20 nt, synthetic construct
  source 1..20: mol_type = other RNA
aatggagaaagtgcaacaag

SEQ ID NO: 34 - RNA, 20 nt, synthetic construct
  source 1..20: mol_type = other RNA
aatggctttcggaagttttg

SEQ ID NO: 35 - RNA, 20 nt, synthetic construct
  source 1..20: mol_type = other RNA
aattggtttccctcttcttc

SEQ ID NO: 36 - RNA, 20 nt, synthetic construct
  source 1..20: mol_type = other RNA
acaagcagaaagggggctgc

SEQ ID NO: 37 - RNA, 20 nt, synthetic construct
  source 1..20: mol_type = other RNA
acaccttccctgagtcagag

SEQ ID NO: 38 - RNA, 20 nt, synthetic construct
  source 1..20: mol_type = other RNA
accctaattggtttccctct

SEQ ID NO: 39 - RNA, 20 nt, synthetic construct
  source 1..20: mol_type = other RNA
accttccctgagtcagagcc

SEQ ID NO: 40 - RNA, 20 nt, synthetic construct
  source 1..20: mol_type = other RNA
accttcttttggagaaatgg

SEQ ID NO: 41 - RNA, 20 nt, synthetic construct
  source 1..20: mol_type = other RNA
acgaatggagaaagtgcaac

SEQ ID NO: 42 - RNA, 20 nt, synthetic construct
  source 1..20: mol_type = other RNA
acgtagccctaggcaggcag

SEQ ID NO: 43 - RNA, 20 nt, synthetic construct
  source 1..20: mol_type = other RNA
acgtatctagtggataatgc

SEQ ID NO: 44 - RNA, 20 nt, synthetic construct
  source 1..20: mol_type = other RNA
acgtcgaagaagagggaaac

SEQ ID NO: 45 - RNA, 20 nt, synthetic construct
  source 1..20: mol_type = other RNA
acgtttcctggcaaaacttc

SEQ ID NO: 46 - RNA, 20 nt, synthetic construct
  source 1..20: mol_type = other RNA
actagatacgtcgaagaaga

SEQ ID NO: 47 - RNA, 20 nt, synthetic construct
  source 1..20: mol_type = other RNA
actcagggaaggtgtgcatt

SEQ ID NO: 48 - RNA, 20 nt, synthetic construct
  source 1..20: mol_type = other RNA
acttccgaaagccatttctc

SEQ ID NO: 49 - RNA, 20 nt, synthetic construct
  source 1..20: mol_type = other RNA
actttctccattcgttcctt

SEQ ID NO: 50 - RNA, 20 nt, synthetic construct
  source 1..20: mol_type = other RNA
agaaagggggctgcaaagct

SEQ ID NO: 51 - RNA, 20 nt, synthetic construct
  source 1..20: mol_type = other RNA
agaaagtgcaacaagcagaa

SEQ ID NO: 52 - RNA, 20 nt, synthetic construct
  source 1..20: mol_type = other RNA
agaaatggctttcggaagtt

SEQ ID NO: 53 - RNA, 20 nt, synthetic construct
  source 1..20: mol_type = other RNA
agaagagggaaaccaattag

SEQ ID NO: 54 - RNA, 20 nt, synthetic construct
  source 1..20: mol_type = other RNA
agaaggtctagaagaggagg

SEQ ID NO: 55 - RNA, 20 nt, synthetic construct
  source 1..20: mol_type = other RNA
agaccttcttttggagaaat

SEQ ID NO: 56 - RNA, 20 nt, synthetic construct
  source 1..20: mol_type = other RNA
agagcctgcaaaaagcaaag

SEQ ID NO: 57 - RNA, 20 nt, synthetic construct
  source 1..20: mol_type = other RNA
agagggaaaccaattagggt

SEQ ID NO: 58 - RNA, 20 nt, synthetic construct
  source 1..20: mol_type = other RNA
agatacgtcgaagaagaggg

SEQ ID NO: 59 - RNA, 20 nt, synthetic construct
  source 1..20: mol_type = other RNA
agcaaaggaacgaatggaga

SEQ ID NO: 60 - RNA, 20 nt, synthetic construct
  source 1..20: mol_type = other RNA
agcagaaagggggctgcaaa

SEQ ID NO: 61 - RNA, 20 nt, synthetic construct
  source 1..20: mol_type = other RNA
agccatttctccaaaagaag

SEQ ID NO: 62 - RNA, 20 nt, synthetic construct
  source 1..20: mol_type = other RNA
agccccctttctgcttgttg

SEQ ID NO: 63 - RNA, 20 nt, synthetic construct
  source 1..20: mol_type = other RNA
agccctaggcaggcagcttt

SEQ ID NO: 64 - RNA, 20 nt, synthetic construct
  source 1..20: mol_type = other RNA
agcctgcaaaaagcaaagga

SEQ ID NO: 65 - RNA, 20 nt, synthetic construct
  source 1..20: mol_type = other RNA
agctgcctgcctagggctac

SEQ ID NO: 66 - RNA, 20 nt, synthetic construct
  source 1..20: mol_type = other RNA
agctttgcagccccctttct

SEQ ID NO: 67 - RNA, 20 nt, synthetic construct
  source 1..20: mol_type = other RNA
aggaaacgtagccctaggca

SEQ ID NO: 68 - RNA, 20 nt, synthetic construct
  source 1..20: mol_type = other RNA
aggaacgaatggagaaagtg

SEQ ID NO: 69 - RNA, 20 nt, synthetic construct
  source 1..20: mol_type = other RNA
aggcagctttgcagccccct

SEQ ID NO: 70 - RNA, 20 nt, synthetic construct
  source 1..20: mol_type = other RNA
aggcaggcagctttgcagcc

SEQ ID NO: 71 - RNA, 20 nt, synthetic construct
  source 1..20: mol_type = other RNA
aggctctgactcagggaagg

SEQ ID NO: 72 - RNA, 20 nt, synthetic construct
  source 1..20: mol_type = other RNA
agggaaaccaattagggtcg

SEQ ID NO: 73 - RNA, 20 nt, synthetic construct
  source 1..20: mol_type = other RNA
agggaaggtgtgcattatcc

SEQ ID NO: 74 - RNA, 20 nt, synthetic construct
  source 1..20: mol_type = other RNA
agggctacgtttcctggcaa

SEQ ID NO: 75 - RNA, 20 nt, synthetic construct
  source 1..20: mol_type = other RNA
agggggctgcaaagctgcct

SEQ ID NO: 76 - RNA, 20 nt, synthetic construct
  source 1..20: mol_type = other RNA
aggtctagaagaggaggagg

SEQ ID NO: 77 - RNA, 20 nt, synthetic construct
  source 1..20: mol_type = other RNA
aggtgtgcattatccactag

SEQ ID NO: 78 - RNA, 20 nt, synthetic construct
  source 1..20: mol_type = other RNA
agtcagagcctgcaaaaagc

SEQ ID NO: 79 - RNA, 20 nt, synthetic construct
  source 1..20: mol_type = other RNA
agtgcaacaagcagaaaggg

SEQ ID NO: 80 - RNA, 20 nt, synthetic construct
  source 1..20: mol_type = other RNA
agtggataatgcacaccttc

SEQ ID NO: 81 - RNA, 20 nt, synthetic construct
  source 1..20: mol_type = other RNA
agttttgccaggaaacgtag

SEQ ID NO: 82 - RNA, 20 nt, synthetic construct
  source 1..20: mol_type = other RNA
ataatgcacaccttccctga

SEQ ID NO: 83 - RNA, 20 nt, synthetic construct
  source 1..20: mol_type = other RNA
atacgtcgaagaagagggaa

SEQ ID NO: 84 - RNA, 20 nt, synthetic construct
  source 1..20: mol_type = other RNA
atccactagatacgtcgaag

SEQ ID NO: 85 - RNA, 20 nt, synthetic construct
  source 1..20: mol_type = other RNA
atctagtggataatgcacac

SEQ ID NO: 86 - RNA, 20 nt, synthetic construct
  source 1..20: mol_type = other RNA
atgcacaccttccctgagtc

SEQ ID NO: 87 - RNA, 20 nt, synthetic construct
  source 1..20: mol_type = other RNA
atggagaaagtgcaacaagc

SEQ ID NO: 88 - RNA, 20 nt, synthetic construct
  source 1..20: mol_type = other RNA
atggctttcggaagttttgc

SEQ ID NO: 89 - RNA, 20 nt, synthetic construct
  source 1..20: mol_type = other RNA
attatccactagatacgtcg

SEQ ID NO: 90 - RNA, 20 nt, synthetic construct
  source 1..20: mol_type = other RNA
attcgttcctttgctttttg

SEQ ID NO: 91 - RNA, 20 nt, synthetic construct
  source 1..20: mol_type = other RNA
attggtttccctcttcttcg

SEQ ID NO: 92 - RNA, 20 nt, synthetic construct
  source 1..20: mol_type = other RNA
atttatttcgaccctaattg

SEQ ID NO: 93 - RNA, 20 nt, synthetic construct
  source 1..20: mol_type = other RNA
atttcgaccctaattggttt

SEQ ID NO: 94 - RNA, 20 nt, synthetic construct
  source 1..20: mol_type = other RNA
atttctccaaaagaaggtct

SEQ ID NO: 95 - RNA, 20 nt, synthetic construct
  source 1..20: mol_type = other RNA
caaaaagcaaaggaacgaat

SEQ ID NO: 96 - RNA, 20 nt, synthetic construct
  source 1..20: mol_type = other RNA
caaaacttccgaaagccatt

SEQ ID NO: 97 - RNA, 20 nt, synthetic construct
  source 1..20: mol_type = other RNA
caaaagaaggtctagaagag

SEQ ID NO: 98 - RNA, 20 nt, synthetic construct
  source 1..20: mol_type = other RNA
caaagctgcctgcctagggc

SEQ ID NO: 99 - RNA, 20 nt, synthetic construct
  source 1..20: mol_type = other RNA
caaaggaacgaatggagaaa

SEQ ID NO: 100 - RNA, 20 nt, synthetic construct
  source 1..20: mol_type = other RNA
caacaagcagaaagggggct

SEQ ID NO: 101 - RNA, 20 nt, synthetic construct
  source 1..20: mol_type = other RNA
caagcagaaagggggctgca

SEQ ID NO: 102 - RNA, 20 nt, synthetic construct
  source 1..20: mol_type = other RNA
cacaccttccctgagtcaga

SEQ ID NO: 103 - RNA, 20 nt, synthetic construct
  source 1..20: mol_type = other RNA
caccttccctgagtcagagc

SEQ ID NO: 104 - RNA, 20 nt, synthetic construct
  source 1..20: mol_type = other RNA
cactagatacgtcgaagaag

SEQ ID NO: 105 - RNA, 20 nt, synthetic construct
  source 1..20: mol_type = other RNA
cactttctccattcgttcct

SEQ ID NO: 106 - RNA, 20 nt, synthetic construct
  source 1..20: mol_type = other RNA
cagaaagggggctgcaaagc

SEQ ID NO: 107 - RNA, 20 nt, synthetic construct
  source 1..20: mol_type = other RNA
cagagcctgcaaaaagcaaa

SEQ ID NO: 108 - RNA, 20 nt, synthetic construct
  source 1..20: mol_type = other RNA
cagccccctttctgcttgtt

SEQ ID NO: 109 - RNA, 20 nt, synthetic construct
  source 1..20: mol_type = other RNA
cagctttgcagccccctttc

SEQ ID NO: 110 - RNA, 20 nt, synthetic construct
  source 1..20: mol_type = other RNA
caggaaacgtagccctaggc

SEQ ID NO: 111 - RNA, 20 nt, synthetic construct
  source 1..20: mol_type = other RNA
caggcagctttgcagccccc

SEQ ID NO: 112 - RNA, 20 nt, synthetic construct
  source 1..20: mol_type = other RNA
caggctctgactcagggaag

SEQ ID NO: 113 - RNA, 20 nt, synthetic construct
  source 1..20: mol_type = other RNA
cagggaaggtgtgcattatc

SEQ ID NO: 114 - RNA, 20 nt, synthetic construct
  source 1..20: mol_type = other RNA
cattatccactagatacgtc

SEQ ID NO: 115 - RNA, 20 nt, synthetic construct
  source 1..20: mol_type = other RNA
cattcgttcctttgcttttt

SEQ ID NO: 116 - RNA, 20 nt, synthetic construct
  source 1..20: mol_type = other RNA
catttatttcgaccctaatt

SEQ ID NO: 117 - RNA, 20 nt, synthetic construct
  source 1..20: mol_type = other RNA
catttctccaaaagaaggtc

SEQ ID NO: 118 - RNA, 20 nt, synthetic construct
  source 1..20: mol_type = other RNA
ccaaaagaaggtctagaaga

SEQ ID NO: 119 - RNA, 20 nt, synthetic construct
  source 1..20: mol_type = other RNA
ccactagatacgtcgaagaa

SEQ ID NO: 120 - RNA, 20 nt, synthetic construct
  source 1..20: mol_type = other RNA
ccaggaaacgtagccctagg

SEQ ID NO: 121 - RNA, 20 nt, synthetic construct
  source 1..20: mol_type = other RNA
ccattcgttcctttgctttt

SEQ ID NO: 122 - RNA, 20 nt, synthetic construct
  source 1..20: mol_type = other RNA
ccatttctccaaaagaaggt

SEQ ID NO: 123 - RNA, 20 nt, synthetic construct
  source 1..20: mol_type = other RNA
ccccctttctgcttgttgca

SEQ ID NO: 124 - RNA, 20 nt, synthetic construct
  source 1..20: mol_type = other RNA
cccctttctgcttgttgcac

SEQ ID NO: 125 - RNA, 20 nt, synthetic construct
  source 1..20: mol_type = other RNA
ccctaattggtttccctctt

SEQ ID NO: 126 - RNA, 20 nt, synthetic construct
  source 1..20: mol_type = other RNA
ccctaggcaggcagctttgc

SEQ ID NO: 127 - RNA, 20 nt, synthetic construct
  source 1..20: mol_type = other RNA
ccctcttcttcgacgtatct

SEQ ID NO: 128 - RNA, 20 nt, synthetic construct
  source 1..20: mol_type = other RNA
ccctgagtcagagcctgcaa

SEQ ID NO: 129 - RNA, 20 nt, synthetic construct
  source 1..20: mol_type = other RNA
ccctttctgcttgttgcact

SEQ ID NO: 130 - RNA, 20 nt, synthetic construct
  source 1..20: mol_type = other RNA
ccgaaagccatttctccaaa

SEQ ID NO: 131 - RNA, 20 nt, synthetic construct
  source 1..20: mol_type = other RNA
cctaattggtttccctcttc

SEQ ID NO: 132 - RNA, 20 nt, synthetic construct
  source 1..20: mol_type = other RNA
cctaggcaggcagctttgca

SEQ ID NO: 133 - RNA, 20 nt, synthetic construct
  source 1..20: mol_type = other RNA
cctagggctacgtttcctgg

SEQ ID NO: 134 - RNA, 20 nt, synthetic construct
  source 1..20: mol_type = other RNA
cctcctcctcctcctcttct

SEQ ID NO: 135 - RNA, 20 nt, synthetic construct
  source 1..20: mol_type = other RNA
cctcctcctcctcttctaga

SEQ ID NO: 136 - RNA, 20 nt, synthetic construct
  source 1..20: mol_type = other RNA
cctcctcctcttctagacct

SEQ ID NO: 137 - RNA, 20 nt, synthetic construct
  source 1..20: mol_type = other RNA
cctcctcttctagaccttct

SEQ ID NO: 138 - RNA, 20 nt, synthetic construct
  source 1..20: mol_type = other RNA
cctcttctagaccttctttt

SEQ ID NO: 139 - RNA, 20 nt, synthetic construct
  source 1..20: mol_type = other RNA
cctcttcttcgacgtatcta

SEQ ID NO: 140 - RNA, 20 nt, synthetic construct
  source 1..20: mol_type = other RNA
cctgagtcagagcctgcaaa

SEQ ID NO: 141 - RNA, 20 nt, synthetic construct
  source 1..20: mol_type = other RNA
cctgcaaaaagcaaaggaac

SEQ ID NO: 142 - RNA, 20 nt, synthetic construct
  source 1..20: mol_type = other RNA
cctgcctagggctacgtttc

SEQ ID NO: 143 - RNA, 20 nt, synthetic construct
  source 1..20: mol_type = other RNA
cctggcaaaacttccgaaag

SEQ ID NO: 144 - RNA, 20 nt, synthetic construct
  source 1..20: mol_type = other RNA
ccttccctgagtcagagcct

SEQ ID NO: 145 - RNA, 20 nt, synthetic construct
  source 1..20: mol_type = other RNA
ccttctcctcctcctcctcc

SEQ ID NO: 146 - RNA, 20 nt, synthetic construct
  source 1..20: mol_type = other RNA
ccttcttttggagaaatggc

SEQ ID NO: 147 - RNA, 20 nt, synthetic construct
  source 1..20: mol_type = other RNA
cctttctgcttgttgcactt

SEQ ID NO: 148 - RNA, 20 nt, synthetic construct
  source 1..20: mol_type = other RNA
cctttgctttttgcaggctc

SEQ ID NO: 149 - RNA, 20 nt, synthetic construct
  source 1..20: mol_type = other RNA
cgaaagccatttctccaaaa

SEQ ID NO: 150 - RNA, 20 nt, synthetic construct
  source 1..20: mol_type = other RNA
cgaagaagagggaaaccaat

SEQ ID NO: 151 - RNA, 20 nt, synthetic construct
  source 1..20: mol_type = other RNA
cgaatggagaaagtgcaaca

SEQ ID NO: 152 - RNA, 20 nt, synthetic construct
  source 1..20: mol_type = other RNA
cgaccctaattggtttccct

SEQ ID NO: 153 - RNA, 20 nt, synthetic construct
  source 1..20: mol_type = other RNA
cgacgtatctagtggataat

SEQ ID NO: 154 - RNA, 20 nt, synthetic construct
  source 1..20: mol_type = other RNA
cggaagttttgccaggaaac

SEQ ID NO: 155 - RNA, 20 nt, synthetic construct
  source 1..20: mol_type = other RNA
cgtagccctaggcaggcagc

SEQ ID NO: 156 - RNA, 20 nt, synthetic construct
  source 1..20: mol_type = other RNA
cgtatctagtggataatgca

SEQ ID NO: 157 - RNA, 20 nt, synthetic construct
  source 1..20: mol_type = other RNA
cgtcgaagaagagggaaacc

SEQ ID NO: 158 - RNA, 20 nt, synthetic construct
  source 1..20: mol_type = other RNA
cgttcctttgctttttgcag

SEQ ID NO: 159 - RNA, 20 nt, synthetic construct
  source 1..20: mol_type = other RNA
cgtttcctggcaaaacttcc

SEQ ID NO: 160 - RNA, 20 nt, synthetic construct
  source 1..20: mol_type = other RNA
ctaattggtttccctcttct

SEQ ID NO: 161 - RNA, 20 nt, synthetic construct
  source 1..20: mol_type = other RNA
ctacgtttcctggcaaaact

SEQ ID NO: 162 - RNA, 20 nt, synthetic construct
  source 1..20: mol_type = other RNA
ctagaagaggaggaggagga

SEQ ID NO: 163 - RNA, 20 nt, synthetic construct
  source 1..20: mol_type = other RNA
ctagaccttcttttggagaa

SEQ ID NO: 164 - RNA, 20 nt, synthetic construct
  source 1..20: mol_type = other RNA
ctagatacgtcgaagaagag

SEQ ID NO: 165 - RNA, 20 nt, synthetic construct
  source 1..20: mol_type = other RNA
ctaggcaggcagctttgcag

SEQ ID NO: 166 - RNA, 20 nt, synthetic construct
  source 1..20: mol_type = other RNA
ctagggctacgtttcctggc

SEQ ID NO: 167 - RNA, 20 nt, synthetic construct
  source 1..20: mol_type = other RNA
ctagtggataatgcacacct

SEQ ID NO: 168 - RNA, 20 nt, synthetic construct
  source 1..20: mol_type = other RNA
ctcagggaaggtgtgcatta

SEQ ID NO: 169 - RNA, 20 nt, synthetic construct
  source 1..20: mol_type = other RNA
ctccaaaagaaggtctagaa

SEQ ID NO: 170 - RNA, 20 nt, synthetic construct
  source 1..20: mol_type = other RNA
ctccattcgttcctttgctt

SEQ ID NO: 171 - RNA, 20 nt, synthetic construct
  source 1..20: mol_type = other RNA
ctcctcctcctcctcctctt

SEQ ID NO: 172 - RNA, 20 nt, synthetic construct
  source 1..20: mol_type = other RNA
ctcctcctcctcctcttcta

SEQ ID NO: 173 - RNA, 20 nt, synthetic construct
  source 1..20: mol_type = other RNA
ctcctcctcctcttctagac

SEQ ID NO: 174 - RNA, 20 nt, synthetic construct
  source 1..20: mol_type = other RNA
ctcctcctcttctagacctt

SEQ ID NO: 175 - RNA, 20 nt, synthetic construct
  source 1..20: mol_type = other RNA
ctcctcttctagaccttctt

SEQ ID NO: 176 - RNA, 20 nt, synthetic construct
  source 1..20: mol_type = other RNA
ctctgactcagggaaggtgt

SEQ ID NO: 177 - RNA, 20 nt, synthetic construct
  source 1..20: mol_type = other RNA
ctcttctagaccttcttttg

SEQ ID NO: 178 - RNA, 20 nt, synthetic construct
  source 1..20: mol_type = other RNA
ctcttcttcgacgtatctag

SEQ ID NO: 179 - RNA, 20 nt, synthetic construct
  source 1..20: mol_type = other RNA
ctgactcagggaaggtgtgc

SEQ ID NO: 180 - RNA, 20 nt, synthetic construct
  source 1..20: mol_type = other RNA
ctgagtcagagcctgcaaaa

SEQ ID NO: 181 - RNA, 20 nt, synthetic construct
  source 1..20: mol_type = other RNA
ctgcaaaaagcaaaggaacg

SEQ ID NO: 182 - RNA, 20 nt, synthetic construct
  source 1..20: mol_type = other RNA
ctgcaaagctgcctgcctag

SEQ ID NO: 183 - RNA, 20 nt, synthetic construct
  source 1..20: mol_type = other RNA
ctgcctagggctacgtttcc

SEQ ID NO: 184 - RNA, 20 nt, synthetic construct
  source 1..20: mol_type = other RNA
ctgcctgcctagggctacgt

SEQ ID NO: 185 - RNA, 20 nt, synthetic construct
  source 1..20: mol_type = other RNA
ctgcttgttgcactttctcc

SEQ ID NO: 186 - RNA, 20 nt, synthetic construct
  source 1..20: mol_type = other RNA
ctggcaaaacttccgaaagc

SEQ ID NO: 187 - RNA, 20 nt, synthetic construct
  source 1..20: mol_type = other RNA
cttccctgagtcagagcctg

SEQ ID NO: 188 - RNA, 20 nt, synthetic construct
  source 1..20: mol_type = other RNA
cttccgaaagccatttctcc

SEQ ID NO: 189 - RNA, 20 nt, synthetic construct
  source 1..20: mol_type = other RNA
cttcgacgtatctagtggat

SEQ ID NO: 190 - RNA, 20 nt, synthetic construct
  source 1..20: mol_type = other RNA
cttctagaccttcttttgga

SEQ ID NO: 191 - RNA, 20 nt, synthetic construct
  source 1..20: mol_type = other RNA
cttctcctcctcctcctcct

SEQ ID NO: 192 - RNA, 20 nt, synthetic construct
  source 1..20: mol_type = other RNA
cttcttcgacgtatctagtg

SEQ ID NO: 193 - RNA, 20 nt, synthetic construct
  source 1..20: mol_type = other RNA
cttcttttggagaaatggct

SEQ ID NO: 194 - RNA, 20 nt, synthetic construct
  source 1..20: mol_type = other RNA
cttgttgcactttctccatt

SEQ ID NO: 195 - RNA, 20 nt, synthetic construct
  source 1..20: mol_type = other RNA
ctttcggaagttttgccagg

SEQ ID NO: 196 - RNA, 20 nt, synthetic construct
  source 1..20: mol_type = other RNA
ctttctccattcgttccttt

SEQ ID NO: 197 - RNA, 20 nt, synthetic construct
  source 1..20: mol_type = other RNA
ctttctgcttgttgcacttt

SEQ ID NO: 198 - RNA, 20 nt, synthetic construct
  source 1..20: mol_type = other RNA
ctttgcagccccctttctgc

SEQ ID NO: 199 - RNA, 20 nt, synthetic construct
  source 1..20: mol_type = other RNA
ctttgctttttgcaggctct

SEQ ID NO: 200 - RNA, 20 nt, synthetic construct
  source 1..20: mol_type = other RNA
cttttggagaaatggctttc

SEQ ID NO: 201 - RNA, 20 nt, synthetic construct
  source 1..20: mol_type = other RNA
ctttttgcaggctctgactc

SEQ ID NO: 202 - RNA, 20 nt, synthetic construct
  source 1..20: mol_type = other RNA
gaaacgtagccctaggcagg

SEQ ID NO: 203 - RNA, 20 nt, synthetic construct
  source 1..20: mol_type = other RNA
gaaagccatttctccaaaag

SEQ ID NO: 204 - RNA, 20 nt, synthetic construct
  source 1..20: mol_type = other RNA
gaaagggggctgcaaagctg

SEQ ID NO: 205 - RNA, 20 nt, synthetic construct
  source 1..20: mol_type = other RNA
gaaagtgcaacaagcagaaa

SEQ ID NO: 206 - RNA, 20 nt, synthetic construct
  source 1..20: mol_type = other RNA
gaaatggctttcggaagttt

SEQ ID NO: 207 - RNA, 20 nt, synthetic construct
  source 1..20: mol_type = other RNA
gaacgaatggagaaagtgca

SEQ ID NO: 208 - RNA, 20 nt, synthetic construct
  source 1..20: mol_type = other RNA
gaagaagagggaaaccaatt

SEQ ID NO: 209 - RNA, 20 nt, synthetic construct
  source 1..20: mol_type = other RNA
gaagagggaaaccaattagg

SEQ ID NO: 210 - RNA, 20 nt, synthetic construct
  source 1..20: mol_type = other RNA
gaaggtctagaagaggagga

SEQ ID NO: 211 - RNA, 20 nt, synthetic construct
  source 1..20: mol_type = other RNA
gaaggtgtgcattatccact

SEQ ID NO: 212 - RNA, 20 nt, synthetic construct
  source 1..20: mol_type = other RNA
gaagttttgccaggaaacgt

SEQ ID NO: 213 - RNA, 20 nt, synthetic construct
  source 1..20: mol_type = other RNA
gaatggagaaagtgcaacaa

SEQ ID NO: 214 - RNA, 20 nt, synthetic construct
  source 1..20: mol_type = other RNA
gaccctaattggtttccctc

SEQ ID NO: 215 - RNA, 20 nt, synthetic construct
  source 1..20: mol_type = other RNA
gaccttcttttggagaaatg

SEQ ID NO: 216 - RNA, 20 nt, synthetic construct
  source 1..20: mol_type = other RNA
gacgtatctagtggataatg

SEQ ID NO: 217 - RNA, 20 nt, synthetic construct
  source 1..20: mol_type = other RNA
gactcagggaaggtgtgcat

SEQ ID NO: 218 - RNA, 20 nt, synthetic construct
  source 1..20: mol_type = other RNA
gagaaagtgcaacaagcaga

SEQ ID NO: 219 - RNA, 20 nt, synthetic construct
  source 1..20: mol_type = other RNA
gagaaatggctttcggaagt

SEQ ID NO: 220 - RNA, 20 nt, synthetic construct
  source 1..20: mol_type = other RNA
gagcctgcaaaaagcaaagg

SEQ ID NO: 221 - RNA, 20 nt, synthetic construct
  source 1..20: mol_type = other RNA
gagggaaaccaattagggtc

SEQ ID NO: 222 - RNA, 20 nt, synthetic construct
  source 1..20: mol_type = other RNA
gagtcagagcctgcaaaaag

SEQ ID NO: 223 - RNA, 20 nt, synthetic construct
  source 1..20: mol_type = other RNA
gataatgcacaccttccctg

SEQ ID NO: 224 - RNA, 20 nt, synthetic construct
  source 1..20: mol_type = other RNA
gatacgtcgaagaagaggga

SEQ ID NO: 225 - RNA, 20 nt, synthetic construct
  source 1..20: mol_type = other RNA
gcaaaaagcaaaggaacgaa

SEQ ID NO: 226 - RNA, 20 nt, synthetic construct
  source 1..20: mol_type = other RNA
gcaaaacttccgaaagccat

SEQ ID NO: 227 - RNA, 20 nt, synthetic construct
  source 1..20: mol_type = other RNA
gcaaagctgcctgcctaggg

SEQ ID NO: 228 - RNA, 20 nt, synthetic construct
  source 1..20: mol_type = other RNA
gcaaaggaacgaatggagaa

SEQ ID NO: 229 - RNA, 20 nt, synthetic construct
  source 1..20: mol_type = other RNA
gcaacaagcagaaagggggc

SEQ ID NO: 230 - RNA, 20 nt, synthetic construct
  source 1..20: mol_type = other RNA
gcacaccttccctgagtcag

SEQ ID NO: 231 - RNA, 20 nt, synthetic construct
  source 1..20: mol_type = other RNA
gcactttctccattcgttcc

SEQ ID NO: 232 - RNA, 20 nt, synthetic construct
  source 1..20: mol_type = other RNA
gcagaaagggggctgcaaag

SEQ ID NO: 233 - RNA, 20 nt, synthetic construct
  source 1..20: mol_type = other RNA
gcagccccctttctgcttgt

SEQ ID NO: 234 - RNA, 20 nt, synthetic construct
  source 1..20: mol_type = other RNA
gcagctttgcagcccccttt

SEQ ID NO: 235 - RNA, 20 nt, synthetic construct
  source 1..20: mol_type = other RNA
gcaggcagctttgcagcccc

SEQ ID NO: 236 - RNA, 20 nt, synthetic construct
  source 1..20: mol_type = other RNA
gcaggctctgactcagggaa

SEQ ID NO: 237 - RNA, 20 nt, synthetic construct
  source 1..20: mol_type = other RNA
gcattatccactagatacgt

SEQ ID NO: 238 - RNA, 20 nt, synthetic construct
  source 1..20: mol_type = other RNA
gcatttatttcgaccctaat

SEQ ID NO: 239 - RNA, 20 nt, synthetic construct
  source 1..20: mol_type = other RNA
gccaggaaacgtagccctag

SEQ ID NO: 240 - RNA, 20 nt, synthetic construct
  source 1..20: mol_type = other RNA
gccatttctccaaaagaagg

SEQ ID NO: 241 - RNA, 20 nt, synthetic construct
  source 1..20: mol_type = other RNA
gccccctttctgcttgttgc

SEQ ID NO: 242 - RNA, 20 nt, synthetic construct
  source 1..20: mol_type = other RNA
gccctaggcaggcagctttg

SEQ ID NO: 243 - RNA, 20 nt, synthetic construct
  source 1..20: mol_type = other RNA
gcctagggctacgtttcctg

SEQ ID NO: 244 - RNA, 20 nt, synthetic construct
  source 1..20: mol_type = other RNA
gcctgcaaaaagcaaaggaa

SEQ ID NO: 245 - RNA, 20 nt, synthetic construct
  source 1..20: mol_type = other RNA
gcctgcctagggctacgttt

SEQ ID NO: 246 - RNA, 20 nt, synthetic construct
  source 1..20: mol_type = other RNA
gctacgtttcctggcaaaac

SEQ ID NO: 247 - RNA, 20 nt, synthetic construct
  source 1..20: mol_type = other RNA
gctctgactcagggaaggtg

SEQ ID NO: 248 - RNA, 20 nt, synthetic construct
  source 1..20: mol_type = other RNA
gctgcaaagctgcctgccta

SEQ ID NO: 249 - RNA, 20 nt, synthetic construct
  source 1..20: mol_type = other RNA
gctgcctgcctagggctacg

SEQ ID NO: 250 - RNA, 20 nt, synthetic construct
  source 1..20: mol_type = other RNA
gcttgttgcactttctccat

SEQ ID NO: 251 - RNA, 20 nt, synthetic construct
  source 1..20: mol_type = other RNA
gctttcggaagttttgccag

SEQ ID NO: 252 - RNA, 20 nt, synthetic construct
  source 1..20: mol_type = other RNA
gctttgcagccccctttctg

SEQ ID NO: 253 - RNA, 20 nt, synthetic construct
  source 1..20: mol_type = other RNA
gctttttgcaggctctgact

SEQ ID NO: 254 - RNA, 20 nt, synthetic construct
  source 1..20: mol_type = other RNA
ggaaaccaattagggtcgaa

SEQ ID NO: 255 - RNA, 20 nt, synthetic construct
  source 1..20: mol_type = other RNA
ggaaacgtagccctaggcag

SEQ ID NO: 256 - RNA, 20 nt, synthetic construct
  source 1..20: mol_type = other RNA
ggaacgaatggagaaagtgc

SEQ ID NO: 257 - RNA, 20 nt, synthetic construct
  source 1..20: mol_type = other RNA
ggaaggtgtgcattatccac

SEQ ID NO: 258 - RNA, 20 nt, synthetic construct
  source 1..20: mol_type = other RNA
ggaagttttgccaggaaacg

SEQ ID NO: 259 - RNA, 20 nt, synthetic construct
  source 1..20: mol_type = other RNA
ggagaaagtgcaacaagcag

SEQ ID NO: 260 - RNA, 20 nt, synthetic construct
  source 1..20: mol_type = other RNA
ggagaaatggctttcggaag

SEQ ID NO: 261 - RNA, 20 nt, synthetic construct
  source 1..20: mol_type = other RNA
ggataatgcacaccttccct

SEQ ID NO: 262 - RNA, 20 nt, synthetic construct
  source 1..20: mol_type = other RNA
ggcaaaacttccgaaagcca

SEQ ID NO: 263 - RNA, 20 nt, synthetic construct
  source 1..20: mol_type = other RNA
ggcagctttgcagccccctt

SEQ ID NO: 264 - RNA, 20 nt, synthetic construct
  source 1..20: mol_type = other RNA
ggcaggcagctttgcagccc

SEQ ID NO: 265 - RNA, 20 nt, synthetic construct
  source 1..20: mol_type = other RNA
ggctacgtttcctggcaaaa

SEQ ID NO: 266 - RNA, 20 nt, synthetic construct
  source 1..20: mol_type = other RNA
ggctctgactcagggaaggt

SEQ ID NO: 267 - RNA, 20 nt, synthetic construct
  source 1..20: mol_type = other RNA
ggctgcaaagctgcctgcct

SEQ ID NO: 268 - RNA, 20 nt, synthetic construct
  source 1..20: mol_type = other RNA
ggctttcggaagttttgcca

SEQ ID NO: 269 - RNA, 20 nt, synthetic construct
  source 1..20: mol_type = other RNA
gggaaaccaattagggtcga

SEQ ID NO: 270 - RNA, 20 nt, synthetic construct
  source 1..20: mol_type = other RNA
gggaaggtgtgcattatcca

SEQ ID NO: 271 - RNA, 20 nt, synthetic construct
  source 1..20: mol_type = other RNA
gggctacgtttcctggcaaa

SEQ ID NO: 272 - RNA, 20 nt, synthetic construct
  source 1..20: mol_type = other RNA
gggctgcaaagctgcctgcc

SEQ ID NO: 273 - RNA, 20 nt, synthetic construct
  source 1..20: mol_type = other RNA
ggggctgcaaagctgcctgc

SEQ ID NO: 274 - RNA, 20 nt, synthetic construct
  source 1..20: mol_type = other RNA
gggggctgcaaagctgcctg

SEQ ID NO: 275 - RNA, 20 nt, synthetic construct
  source 1..20: mol_type = other RNA
ggtctagaagaggaggagga

SEQ ID NO: 276 - RNA, 20 nt, synthetic construct
  source 1..20: mol_type = other RNA
ggtgtgcattatccactaga

SEQ ID NO: 277 - RNA, 20 nt, synthetic construct
  source 1..20: mol_type = other RNA
ggtttccctcttcttcgacg

SEQ ID NO: 278 - RNA, 20 nt, synthetic construct
  source 1..20: mol_type = other RNA
gtagccctaggcaggcagct

SEQ ID NO: 279 - RNA, 20 nt, synthetic construct
  source 1..20: mol_type = other RNA
gtatctagtggataatgcac

SEQ ID NO: 280 - RNA, 20 nt, synthetic construct
  source 1..20: mol_type = other RNA
gtcagagcctgcaaaaagca

SEQ ID NO: 281 - RNA, 20 nt, synthetic construct
  source 1..20: mol_type = other RNA
gtcgaagaagagggaaacca

SEQ ID NO: 282 - RNA, 20 nt, synthetic construct
  source 1..20: mol_type = other RNA
gtctagaagaggaggaggag

SEQ ID NO: 283 - RNA, 20 nt, synthetic construct
  source 1..20: mol_type = other RNA
gtgcaacaagcagaaagggg

SEQ ID NO: 284 - RNA, 20 nt, synthetic construct
  source 1..20: mol_type = other RNA
gtgcattatccactagatac

SEQ ID NO: 285 - RNA, 20 nt, synthetic construct
  source 1..20: mol_type = other RNA
gtggataatgcacaccttcc

SEQ ID NO: 286 - RNA, 20 nt, synthetic construct
  source 1..20: mol_type = other RNA
gtgtgcattatccactagat

SEQ ID NO: 287 - RNA, 20 nt, synthetic construct
  source 1..20: mol_type = other RNA
gttcctttgctttttgcagg

SEQ ID NO: 288 - RNA, 20 nt, synthetic construct
  source 1..20: mol_type = other RNA
gttgcactttctccattcgt

SEQ ID NO: 289 - RNA, 20 nt, synthetic construct
  source 1..20: mol_type = other RNA
gtttccctcttcttcgacgt

SEQ ID NO: 290 - RNA, 20 nt, synthetic construct
  source 1..20: mol_type = other RNA
gtttcctggcaaaacttccg

SEQ ID NO: 291 - RNA, 20 nt, synthetic construct
  source 1..20: mol_type = other RNA
gttttgccaggaaacgtagc

SEQ ID NO: 292 - RNA, 20 nt, synthetic construct
  source 1..20: mol_type = other RNA
taatgcacaccttccctgag

SEQ ID NO: 293 - RNA, 20 nt, synthetic construct
  source 1..20: mol_type = other RNA
taattggtttccctcttctt

SEQ ID NO: 294 - RNA, 20 nt, synthetic construct
  source 1..20: mol_type = other RNA
tacgtcgaagaagagggaaa

SEQ ID NO: 295 - RNA, 20 nt, synthetic construct
  source 1..20: mol_type = other RNA
tacgtttcctggcaaaactt

SEQ ID NO: 296 - RNA, 20 nt, synthetic construct
  source 1..20: mol_type = other RNA
tagaagaggaggaggaggag

SEQ ID NO: 297 - RNA, 20 nt, synthetic construct
  source 1..20: mol_type = other RNA
tagaccttcttttggagaaa

SEQ ID NO: 298 - RNA, 20 nt, synthetic construct
  source 1..20: mol_type = other RNA
tagatacgtcgaagaagagg

SEQ ID NO: 299 - RNA, 20 nt, synthetic construct
  source 1..20: mol_type = other RNA
tagccctaggcaggcagctt

SEQ ID NO: 300 - RNA, 20 nt, synthetic construct
  source 1..20: mol_type = other RNA
taggcaggcagctttgcagc

SEQ ID NO: 301 - RNA, 20 nt, synthetic construct
  source 1..20: mol_type = other RNA
tagggctacgtttcctggca

SEQ ID NO: 302 - RNA, 20 nt, synthetic construct
  source 1..20: mol_type = other RNA
tagtggataatgcacacctt

SEQ ID NO: 303 - RNA, 20 nt, synthetic construct
  source 1..20: mol_type = other RNA
tatccactagatacgtcgaa

SEQ ID NO: 304 - RNA, 20 nt, synthetic construct
  source 1..20: mol_type = other RNA
tatctagtggataatgcaca

SEQ ID NO: 305 - RNA, 20 nt, synthetic construct
  source 1..20: mol_type = other RNA
tatttcgaccctaattggtt

SEQ ID NO: 306 - RNA, 20 nt, synthetic construct
  source 1..20: mol_type = other RNA
tcagagcctgcaaaaagcaa

SEQ ID NO: 307 - RNA, 20 nt, synthetic construct
  source 1..20: mol_type = other RNA
tcagggaaggtgtgcattat

SEQ ID NO: 308 - RNA, 20 nt, synthetic construct
  source 1..20: mol_type = other RNA
tccaaaagaaggtctagaag

SEQ ID NO: 309 - RNA, 20 nt, synthetic construct
  source 1..20: mol_type = other RNA
tccactagatacgtcgaaga

SEQ ID NO: 310 - RNA, 20 nt, synthetic construct
  source 1..20: mol_type = other RNA
tccattcgttcctttgcttt

SEQ ID NO: 311 - RNA, 20 nt, synthetic construct
  source 1..20: mol_type = other RNA
tccctcttcttcgacgtatc

SEQ ID NO: 312 - RNA, 20 nt, synthetic construct
  source 1..20: mol_type = other RNA
tccctgagtcagagcctgca

SEQ ID NO: 313 - RNA, 20 nt, synthetic construct
  source 1..20: mol_type = other RNA
tccgaaagccatttctccaa

SEQ ID NO: 314 - RNA, 20 nt, synthetic construct
  source 1..20: mol_type = other RNA
tcctcctcctcctcctcttc

SEQ ID NO: 315 - RNA, 20 nt, synthetic construct
  source 1..20: mol_type = other RNA
tcctcctcctcctcttctag

SEQ ID NO: 316 - RNA, 20 nt, synthetic construct
  source 1..20: mol_type = other RNA
tcctcctcctcttctagacc

SEQ ID NO: 317 - RNA, 20 nt, synthetic construct
  source 1..20: mol_type = other RNA
tcctcctcttctagaccttc

SEQ ID NO: 318 - RNA, 20 nt, synthetic construct
  source 1..20: mol_type = other RNA
tcctcttctagaccttcttt

SEQ ID NO: 319 - RNA, 20 nt, synthetic construct
  source 1..20: mol_type = other RNA
tcctggcaaaacttccgaaa

SEQ ID NO: 320 - RNA, 20 nt, synthetic construct
  source 1..20: mol_type = other RNA
tccttctcctcctcctcctc

SEQ ID NO: 321 - RNA, 20 nt, synthetic construct
  source 1..20: mol_type = other RNA
tcctttgctttttgcaggct

SEQ ID NO: 322 - RNA, 20 nt, synthetic construct
  source 1..20: mol_type = other RNA
tcgaagaagagggaaaccaa

SEQ ID NO: 323 - RNA, 20 nt, synthetic construct
  source 1..20: mol_type = other RNA
tcgaccctaattggtttccc

SEQ ID NO: 324 - RNA, 20 nt, synthetic construct
  source 1..20: mol_type = other RNA
tcgacgtatctagtggataa

SEQ ID NO: 325 - RNA, 20 nt, synthetic construct
  source 1..20: mol_type = other RNA
tcggaagttttgccaggaaa

SEQ ID NO: 326 - RNA, 20 nt, synthetic construct
  source 1..20: mol_type = other RNA
tcgttcctttgctttttgca

SEQ ID NO: 327 - RNA, 20 nt, synthetic construct
  source 1..20: mol_type = other RNA
tctagaagaggaggaggagg

SEQ ID NO: 328 - RNA, 20 nt, synthetic construct
  source 1..20: mol_type = other RNA
tctagaccttcttttggaga

SEQ ID NO: 329 - RNA, 20 nt, synthetic construct
  source 1..20: mol_type = other RNA
tctagtggataatgcacacc

SEQ ID NO: 330 - RNA, 20 nt, synthetic construct
  source 1..20: mol_type = other RNA
tctccaaaagaaggtctaga

SEQ ID NO: 331 - RNA, 20 nt, synthetic construct
  source 1..20: mol_type = other RNA
tctccattcgttcctttgct

SEQ ID NO: 332 - RNA, 20 nt, synthetic construct
  source 1..20: mol_type = other RNA
tctcctcctcctcctcctct

SEQ ID NO: 333 - RNA, 20 nt, synthetic construct
  source 1..20: mol_type = other RNA
tctgactcagggaaggtgtg

SEQ ID NO: 334 - RNA, 20 nt, synthetic construct
  source 1..20: mol_type = other RNA
tctgcttgttgcactttctc

SEQ ID NO: 335 - RNA, 20 nt, synthetic construct
  source 1..20: mol_type = other RNA
tcttcgacgtatctagtgga

SEQ ID NO: 336 - RNA, 20 nt, synthetic construct
  source 1..20: mol_type = other RNA
tcttctagaccttcttttgg

SEQ ID NO: 337 - RNA, 20 nt, synthetic construct
  source 1..20: mol_type = other RNA
tcttcttcgacgtatctagt

SEQ ID NO: 338 - RNA, 20 nt, synthetic construct
  source 1..20: mol_type = other RNA
tcttttggagaaatggcttt

SEQ ID NO: 339 - RNA, 20 nt, synthetic construct
  source 1..20: mol_type = other RNA
tgactcagggaaggtgtgca

SEQ ID NO: 340 - RNA, 20 nt, synthetic construct
  source 1..20: mol_type = other RNA
tgagtcagagcctgcaaaaa

SEQ ID NO: 341 - RNA, 20 nt, synthetic construct
  source 1..20: mol_type = other RNA
tgcaaaaagcaaaggaacga

SEQ ID NO: 342 - RNA, 20 nt, synthetic construct
  source 1..20: mol_type = other RNA
tgcaaagctgcctgcctagg

SEQ ID NO: 343 - RNA, 20 nt, synthetic construct
  source 1..20: mol_type = other RNA
tgcaacaagcagaaaggggg

SEQ ID NO: 344 - RNA, 20 nt, synthetic construct
  source 1..20: mol_type = other RNA
tgcacaccttccctgagtca

SEQ ID NO: 345 - RNA, 20 nt, synthetic construct
  source 1..20: mol_type = other RNA
tgcactttctccattcgttc

SEQ ID NO: 346 - RNA, 20 nt, synthetic construct
  source 1..20: mol_type = other RNA
tgcagccccctttctgcttg

SEQ ID NO: 347 - RNA, 20 nt, synthetic construct
  source 1..20: mol_type = other RNA
tgcaggctctgactcaggga

SEQ ID NO: 348 - RNA, 20 nt, synthetic construct
  source 1..20: mol_type = other RNA
tgcattatccactagatacg

SEQ ID NO: 349 - RNA, 20 nt, synthetic construct
  source 1..20: mol_type = other RNA
tgccaggaaacgtagcccta

SEQ ID NO: 350 - RNA, 20 nt, synthetic construct
  source 1..20: mol_type = other RNA
tgcctagggctacgtttcct

SEQ ID NO: 351 - RNA, 20 nt, synthetic construct
  source 1..20: mol_type = other RNA
tgcctgcctagggctacgtt

SEQ ID NO: 352 - RNA, 20 nt, synthetic construct
  source 1..20: mol_type = other RNA
tgcttgttgcactttctcca

SEQ ID NO: 353 - RNA, 20 nt, synthetic construct
  source 1..20: mol_type = other RNA
tgctttttgcaggctctgac

SEQ ID NO: 354 - RNA, 20 nt, synthetic construct
  source 1..20: mol_type = other RNA
tggagaaagtgcaacaagca

SEQ ID NO: 355 - RNA, 20 nt, synthetic construct
  source 1..20: mol_type = other RNA
tggagaaatggctttcggaa

SEQ ID NO: 356 - RNA, 20 nt, synthetic construct
  source 1..20: mol_type = other RNA
tggataatgcacaccttccc

SEQ ID NO: 357 - RNA, 20 nt, synthetic construct
  source 1..20: mol_type = other RNA
tggcaaaacttccgaaagcc

SEQ ID NO: 358 - RNA, 20 nt, synthetic construct
  source 1..20: mol_type = other RNA
tggctttcggaagttttgcc

SEQ ID NO: 359 - RNA, 20 nt, synthetic construct
  source 1..20: mol_type = other RNA
tggtttccctcttcttcgac

SEQ ID NO: 360 - RNA, 20 nt, synthetic construct
  source 1..20: mol_type = other RNA
tgtgcattatccactagata

SEQ ID NO: 361 - RNA, 20 nt, synthetic construct
  source 1..20: mol_type = other RNA
tgttgcactttctccattcg

SEQ ID NO: 362 - RNA, 20 nt, synthetic construct
  source 1..20: mol_type = other RNA
ttatccactagatacgtcga

SEQ ID NO: 363 - RNA, 20 nt, synthetic construct
  source 1..20: mol_type = other RNA
ttatttcgaccctaattggt

SEQ ID NO: 364 - RNA, 20 nt, synthetic construct
  source 1..20: mol_type = other RNA
ttccctcttcttcgacgtat

SEQ ID NO: 365 - RNA, 20 nt, synthetic construct
  source 1..20: mol_type = other RNA
ttccctgagtcagagcctgc

SEQ ID NO: 366 - RNA, 20 nt, synthetic construct
  source 1..20: mol_type = other RNA
ttccgaaagccatttctcca

SEQ ID NO: 367 - RNA, 20 nt, synthetic construct
  source 1..20: mol_type = other RNA
ttcctggcaaaacttccgaa

SEQ ID NO: 368 - RNA, 20 nt, synthetic construct
  source 1..20: mol_type = other RNA
ttcctttgctttttgcaggc

SEQ ID NO: 369 - RNA, 20 nt, synthetic construct
  source 1..20: mol_type = other RNA
ttcgaccctaattggtttcc

SEQ ID NO: 370 - RNA, 20 nt, synthetic construct
  source 1..20: mol_type = other RNA
ttcgacgtatctagtggata

SEQ ID NO: 371 - RNA, 20 nt, synthetic construct
  source 1..20: mol_type = other RNA
ttcggaagttttgccaggaa

SEQ ID NO: 372 - RNA, 20 nt, synthetic construct
  source 1..20: mol_type = other RNA
ttcgttcctttgctttttgc

SEQ ID NO: 373 - RNA, 20 nt, synthetic construct
  source 1..20: mol_type = other RNA
ttctagaccttcttttggag

SEQ ID NO: 374 - RNA, 20 nt, synthetic construct
  source 1..20: mol_type = other RNA
ttctccaaaagaaggtctag

SEQ ID NO: 375 - RNA, 20 nt, synthetic construct
  source 1..20: mol_type = other RNA
ttctccattcgttcctttgc

SEQ ID NO: 376 - RNA, 20 nt, synthetic construct
  source 1..20: mol_type = other RNA
ttctcctcctcctcctcctc

SEQ ID NO: 377 - RNA, 20 nt, synthetic construct
  source 1..20: mol_type = other RNA
ttctgcttgttgcactttct

SEQ ID NO: 378 - RNA, 20 nt, synthetic construct
  source 1..20: mol_type = other RNA
ttcttcgacgtatctagtgg

SEQ ID NO: 379 - RNA, 20 nt, synthetic construct
  source 1..20: mol_type = other RNA
ttcttttggagaaatggctt

SEQ ID NO: 380 - RNA, 20 nt, synthetic construct
  source 1..20: mol_type = other RNA
ttgcactttctccattcgtt

SEQ ID NO: 381 - RNA, 20 nt, synthetic construct
  source 1..20: mol_type = other RNA
ttgcagccccctttctgctt

SEQ ID NO: 382 - RNA, 20 nt, synthetic construct
  source 1..20: mol_type = other RNA
ttgcaggctctgactcaggg

SEQ ID NO: 383 - RNA, 20 nt, synthetic construct
  source 1..20: mol_type = other RNA
ttgccaggaaacgtagccct

SEQ ID NO: 384 - RNA, 20 nt, synthetic construct
  source 1..20: mol_type = other RNA
ttgctttttgcaggctctga

SEQ ID NO: 385 - RNA, 20 nt, synthetic construct
  source 1..20: mol_type = other RNA
ttggagaaatggctttcgga

SEQ ID NO: 386 - RNA, 20 nt, synthetic construct
  source 1..20: mol_type = other RNA
ttggtttccctcttcttcga

SEQ ID NO: 387 - RNA, 20 nt, synthetic construct
  source 1..20: mol_type = other RNA
ttgttgcactttctccattc

SEQ ID NO: 388 - RNA, 20 nt, synthetic construct
  source 1..20: mol_type = other RNA
tttatttcgaccctaattgg

SEQ ID NO: 389 - RNA, 20 nt, synthetic construct
  source 1..20: mol_type = other RNA
tttccctcttcttcgacgta

SEQ ID NO: 390 - RNA, 20 nt, synthetic construct
  source 1..20: mol_type = other RNA
tttcctggcaaaacttccga

SEQ ID NO: 391 - RNA, 20 nt, synthetic construct
  source 1..20: mol_type = other RNA
tttcgaccctaattggtttc

SEQ ID NO: 392 - RNA, 20 nt, synthetic construct
  source 1..20: mol_type = other RNA
tttcggaagttttgccagga

SEQ ID NO: 393 - RNA, 20 nt, synthetic construct
  source 1..20: mol_type = other RNA
tttctccaaaagaaggtcta

SEQ ID NO: 394 - RNA, 20 nt, synthetic construct
  source 1..20: mol_type = other RNA
tttctccattcgttcctttg

SEQ ID NO: 395 - RNA, 20 nt, synthetic construct
  source 1..20: mol_type = other RNA
tttctgcttgttgcactttc

SEQ ID NO: 396 - RNA, 20 nt, synthetic construct
  source 1..20: mol_type = other RNA
tttgcagccccctttctgct

SEQ ID NO: 397 - RNA, 20 nt, synthetic construct
  source 1..20: mol_type = other RNA
tttgcaggctctgactcagg

SEQ ID NO: 398 - RNA, 20 nt, synthetic construct
  source 1..20: mol_type = other RNA
tttgccaggaaacgtagccc

SEQ ID NO: 399 - RNA, 20 nt, synthetic construct
  source 1..20: mol_type = other RNA
tttgctttttgcaggctctg

SEQ ID NO: 400 - RNA, 20 nt, synthetic construct
  source 1..20: mol_type = other RNA
tttggagaaatggctttcgg

SEQ ID NO: 401 - RNA, 20 nt, synthetic construct
  source 1..20: mol_type = other RNA
ttttgcaggctctgactcag

SEQ ID NO: 402 - RNA, 20 nt, synthetic construct
  source 1..20: mol_type = other RNA
ttttgccaggaaacgtagcc

SEQ ID NO: 403 - RNA, 20 nt, synthetic construct
  source 1..20: mol_type = other RNA
ttttggagaaatggctttcg

SEQ ID NO: 404 - RNA, 20 nt, synthetic construct
  source 1..20: mol_type = other RNA
tttttgcaggctctgactca

SEQ ID NO: 405 - RNA, 20 nt, synthetic construct
  source 1..20: mol_type = other RNA
caggcaaatcctatacgaga

SEQ ID NO: 406 - RNA, 21 nt, synthetic construct
  source 1..21: mol_type = other RNA
aaaaagcaaaggaacgaatgg

SEQ ID NO: 407 - RNA, 21 nt, synthetic construct
  source 1..21: mol_type = other RNA
aaaacttccgaaagccatttc

SEQ ID NO: 408 - RNA, 21 nt, synthetic construct
  source 1..21: mol_type = other RNA
aaaagaaggtctagaagagga

SEQ ID NO: 409 - RNA, 21 nt, synthetic construct
  source 1..21: mol_type = other RNA
aaaagcaaaggaacgaatgga

SEQ ID NO: 410 - RNA, 21 nt, synthetic construct
  source 1..21: mol_type = other RNA
aaacgtagccctaggcaggca

SEQ ID NO: 411 - RNA, 21 nt, synthetic construct
  source 1..21: mol_type = other RNA
aaacttccgaaagccatttct

SEQ ID NO: 412 - RNA, 21 nt, synthetic construct
  source 1..21: mol_type = other RNA
aaagaaggtctagaagaggag

SEQ ID NO: 413 - RNA, 21 nt, synthetic construct
  source 1..21: mol_type = other RNA
aaagcaaaggaacgaatggag

SEQ ID NO: 414 - RNA, 21 nt, synthetic construct
  source 1..21: mol_type = other RNA
aaagccatttctccaaaagaa

SEQ ID NO: 415 - RNA, 21 nt, synthetic construct
  source 1..21: mol_type = other RNA
aaagctgcctgcctagggcta

SEQ ID NO: 416 - RNA, 21 nt, synthetic construct
  source 1..21: mol_type = other RNA
aaaggaacgaatggagaaagt

SEQ ID NO: 417 - RNA, 21 nt, synthetic construct
  source 1..21: mol_type = other RNA
aaagggggctgcaaagctgcc

SEQ ID NO: 418 - RNA, 21 nt, synthetic construct
  source 1..21: mol_type = other RNA
aaagtgcaacaagcagaaagg

SEQ ID NO: 419 - RNA, 21 nt, synthetic construct
  source 1..21: mol_type = other RNA
aaatggctttcggaagttttg

SEQ ID NO: 420 - RNA, 21 nt, synthetic construct
  source 1..21: mol_type = other RNA
aacaagcagaaagggggctgc

SEQ ID NO: 421 - RNA, 21 nt, synthetic construct
  source 1..21: mol_type = other RNA
aacgaatggagaaagtgcaac

SEQ ID NO: 422 - RNA, 21 nt, synthetic construct
  source 1..21: mol_type = other RNA
aacgtagccctaggcaggcag

SEQ ID NO: 423 - RNA, 21 nt, synthetic construct
  source 1..21: mol_type = other RNA
aacttccgaaagccatttctc

SEQ ID NO: 424 - RNA, 21 nt, synthetic construct
  source 1..21: mol_type = other RNA
aagaagagggaaaccaattag

SEQ ID NO: 425 - RNA, 21 nt, synthetic construct
  source 1..21: mol_type = other RNA
aagaaggtctagaagaggagg

SEQ ID NO: 426 - RNA, 21 nt, synthetic construct
  source 1..21: mol_type = other RNA
aagagggaaaccaattagggt

SEQ ID NO: 427 - RNA, 21 nt, synthetic construct
  source 1..21: mol_type = other RNA
aagcaaaggaacgaatggaga

SEQ ID NO: 428 - RNA, 21 nt, synthetic construct
  source 1..21: mol_type = other RNA
aagcagaaagggggctgcaaa

SEQ ID NO: 429 - RNA, 21 nt, synthetic construct
  source 1..21: mol_type = other RNA
aagccatttctccaaaagaag

SEQ ID NO: 430 - RNA, 21 nt, synthetic construct
  source 1..21: mol_type = other RNA
aagctgcctgcctagggctac

SEQ ID NO: 431 - RNA, 21 nt, synthetic construct
  source 1..21: mol_type = other RNA
aaggaacgaatggagaaagtg

SEQ ID NO: 432 - RNA, 21 nt, synthetic construct
  source 1..21: mol_type = other RNA
aagggggctgcaaagctgcct

SEQ ID NO: 433 - RNA, 21 nt, synthetic construct
  source 1..21: mol_type = other RNA
aaggtctagaagaggaggagg

SEQ ID NO: 434 - RNA, 21 nt, synthetic construct
  source 1..21: mol_type = other RNA
aaggtgtgcattatccactag

SEQ ID NO: 435 - RNA, 21 nt, synthetic construct
  source 1..21: mol_type = other RNA
aagtgcaacaagcagaaaggg

SEQ ID NO: 436 - RNA, 21 nt, synthetic construct
  source 1..21: mol_type = other RNA
aagttttgccaggaaacgtag

SEQ ID NO: 437 - RNA, 21 nt, synthetic construct
  source 1..21: mol_type = other RNA
aatgcacaccttccctgagtc

SEQ ID NO: 438 - RNA, 21 nt, synthetic construct
  source 1..21: mol_type = other RNA
aatggagaaagtgcaacaagc

SEQ ID NO: 439 - RNA, 21 nt, synthetic construct
  source 1..21: mol_type = other RNA
aatggctttcggaagttttgc

SEQ ID NO: 440 - RNA, 21 nt, synthetic construct
  source 1..21: mol_type = other RNA
aattggtttccctcttcttcg

SEQ ID NO: 441 - RNA, 21 nt, synthetic construct
  source 1..21: mol_type = other RNA
acaagcagaaagggggctgca

SEQ ID NO: 442 - RNA, 21 nt, synthetic construct
  source 1..21: mol_type = other RNA
acaccttccctgagtcagagc

SEQ ID NO: 443 - RNA, 21 nt, synthetic construct
  source 1..21: mol_type = other RNA
accctaattggtttccctctt

SEQ ID NO: 444 - RNA, 21 nt, synthetic construct
  source 1..21: mol_type = other RNA
accttccctgagtcagagcct

SEQ ID NO: 445 - RNA, 21 nt, synthetic construct
  source 1..21: mol_type = other RNA
accttcttttggagaaatggc

SEQ ID NO: 446 - RNA, 21 nt, synthetic construct
  source 1..21: mol_type = other RNA
acgaatggagaaagtgcaaca

SEQ ID NO: 447 - RNA, 21 nt, synthetic construct
  source 1..21: mol_type = other RNA
acgtagccctaggcaggcagc

SEQ ID NO: 448 - RNA, 21 nt, synthetic construct
  source 1..21: mol_type = other RNA
acgtatctagtggataatgca

SEQ ID NO: 449 - RNA, 21 nt, synthetic construct
  source 1..21: mol_type = other RNA
acgtcgaagaagagggaaacc

SEQ ID NO: 450 - RNA, 21 nt, synthetic construct
  source 1..21: mol_type = other RNA
acgtttcctggcaaaacttcc

SEQ ID NO: 451 - RNA, 21 nt, synthetic construct
  source 1..21: mol_type = other RNA
actagatacgtcgaagaagag

SEQ ID NO: 452 - RNA, 21 nt, synthetic construct
  source 1..21: mol_type = other RNA
actcagggaaggtgtgcatta

SEQ ID NO: 453 - RNA, 21 nt, synthetic construct
  source 1..21: mol_type = other RNA
acttccgaaagccatttctcc

SEQ ID NO: 454 - RNA, 21 nt, synthetic construct
  source 1..21: mol_type = other RNA
actttctccattcgttccttt

SEQ ID NO: 455 - RNA, 21 nt, synthetic construct
  source 1..21: mol_type = other RNA
agaaagggggctgcaaagctg

SEQ ID NO: 456 - RNA, 21 nt, synthetic construct
  source 1..21: mol_type = other RNA
agaaagtgcaacaagcagaaa

SEQ ID NO: 457 - RNA, 21 nt, synthetic construct
  source 1..21: mol_type = other RNA
agaaatggctttcggaagttt

SEQ ID NO: 458 - RNA, 21 nt, synthetic construct
  source 1..21: mol_type = other RNA
agaagagggaaaccaattagg

SEQ ID NO: 459 - RNA, 21 nt, synthetic construct
  source 1..21: mol_type = other RNA
agaaggtctagaagaggagga

SEQ ID NO: 460 - RNA, 21 nt, synthetic construct
  source 1..21: mol_type = other RNA
agaccttcttttggagaaatg

SEQ ID NO: 461 - RNA, 21 nt, synthetic construct
  source 1..21: mol_type = other RNA
agagcctgcaaaaagcaaagg

SEQ ID NO: 462 - RNA, 21 nt, synthetic construct
  source 1..21: mol_type = other RNA
agagggaaaccaattagggtc

SEQ ID NO: 463 - RNA, 21 nt, synthetic construct
  source 1..21: mol_type = other RNA
agatacgtcgaagaagaggga

SEQ ID NO: 464 - RNA, 21 nt, synthetic construct
  source 1..21: mol_type = other RNA
agcaaaggaacgaatggagaa

SEQ ID NO: 465 - RNA, 21 nt, synthetic construct
  source 1..21: mol_type = other RNA
agcagaaagggggctgcaaag

SEQ ID NO: 466 - RNA, 21 nt, synthetic construct
  source 1..21: mol_type = other RNA
agccatttctccaaaagaagg

SEQ ID NO: 467 - RNA, 21 nt, synthetic construct
  source 1..21: mol_type = other RNA
agccccctttctgcttgttgc

SEQ ID NO: 468 - RNA, 21 nt, synthetic construct
  source 1..21: mol_type = other RNA
agccctaggcaggcagctttg

SEQ ID NO: 469 - RNA, 21 nt, synthetic construct
  source 1..21: mol_type = other RNA
agcctgcaaaaagcaaaggaa

SEQ ID NO: 470 - RNA, 21 nt, synthetic construct
  source 1..21: mol_type = other RNA
agctgcctgcctagggctacg

SEQ ID NO: 471 - RNA, 21 nt, synthetic construct
  source 1..21: mol_type = other RNA
agctttgcagccccctttctg

SEQ ID NO: 472 - RNA, 21 nt, synthetic construct
  source 1..21: mol_type = other RNA
aggaaacgtagccctaggcag

SEQ ID NO: 473 - RNA, 21 nt, synthetic construct
  source 1..21: mol_type = other RNA
aggaacgaatggagaaagtgc

SEQ ID NO: 474 - RNA, 21 nt, synthetic construct
  source 1..21: mol_type = other RNA
aggcagctttgcagccccctt

SEQ ID NO: 475 - RNA, 21 nt, synthetic construct
  source 1..21: mol_type = other RNA
aggcaggcagctttgcagccc

SEQ ID NO: 476 - RNA, 21 nt, synthetic construct
  source 1..21: mol_type = other RNA
aggctctgactcagggaaggt

SEQ ID NO: 477 - RNA, 21 nt, synthetic construct
  source 1..21: mol_type = other RNA
agggaaaccaattagggtcga

SEQ ID NO: 478 - RNA, 21 nt, synthetic construct
  source 1..21: mol_type = other RNA
agggaaggtgtgcattatcca

SEQ ID NO: 479 - RNA, 21 nt, synthetic construct
  source 1..21: mol_type = other RNA
agggctacgtttcctggcaaa

SEQ ID NO: 480 - RNA, 21 nt, synthetic construct
  source 1..21: mol_type = other RNA
agggggctgcaaagctgcctg

SEQ ID NO: 481 - RNA, 21 nt, synthetic construct
  source 1..21: mol_type = other RNA
aggtctagaagaggaggagga

SEQ ID NO: 482 - RNA, 21 nt, synthetic construct
  source 1..21: mol_type = other RNA
aggtgtgcattatccactaga

SEQ ID NO: 483 - RNA, 21 nt, synthetic construct
  source 1..21: mol_type = other RNA
agtcagagcctgcaaaaagca

SEQ ID NO: 484 - RNA, 21 nt, synthetic construct
  source 1..21: mol_type = other RNA
agtgcaacaagcagaaagggg

SEQ ID NO: 485 - RNA, 21 nt, synthetic construct
  source 1..21: mol_type = other RNA
agtggataatgcacaccttcc

SEQ ID NO: 486 - RNA, 21 nt, synthetic construct
  source 1..21: mol_type = other RNA
agttttgccaggaaacgtagc

SEQ ID NO: 487 - RNA, 21 nt, synthetic construct
  source 1..21: mol_type = other RNA
ataatgcacaccttccctgag

SEQ ID NO: 488 - RNA, 21 nt, synthetic construct
  source 1..21: mol_type = other RNA
atacgtcgaagaagagggaaa

SEQ ID NO: 489 - RNA, 21 nt, synthetic construct
  source 1..21: mol_type = other RNA
atccactagatacgtcgaaga

SEQ ID NO: 490 - RNA, 21 nt, synthetic construct
  source 1..21: mol_type = other RNA
atctagtggataatgcacacc

SEQ ID NO: 491 - RNA, 21 nt, synthetic construct
  source 1..21: mol_type = other RNA
atgcacaccttccctgagtca

SEQ ID NO: 492 - RNA, 21 nt, synthetic construct
  source 1..21: mol_type = other RNA
atggagaaagtgcaacaagca

SEQ ID NO: 493 - RNA, 21 nt, synthetic construct
  source 1..21: mol_type = other RNA
atggctttcggaagttttgcc

SEQ ID NO: 494 - RNA, 21 nt, synthetic construct
  source 1..21: mol_type = other RNA
attatccactagatacgtcga

SEQ ID NO: 495 - RNA, 21 nt, synthetic construct
  source 1..21: mol_type = other RNA
attcgttcctttgctttttgc

SEQ ID NO: 496 - RNA, 21 nt, synthetic construct
  source 1..21: mol_type = other RNA
attggtttccctcttcttcga

SEQ ID NO: 497 - RNA, 21 nt, synthetic construct
  source 1..21: mol_type = other RNA
atttatttcgaccctaattgg

SEQ ID NO: 498 - RNA, 21 nt, synthetic construct
  source 1..21: mol_type = other RNA
atttcgaccctaattggtttc

SEQ ID NO: 499 - RNA, 21 nt, synthetic construct
  source 1..21: mol_type = other RNA
atttctccaaaagaaggtcta

SEQ ID NO: 500 - RNA, 21 nt, synthetic construct
  source 1..21: mol_type = other RNA
caaaaagcaaaggaacgaatg

SEQ ID NO: 501 - RNA, 21 nt, synthetic construct
  source 1..21: mol_type = other RNA
caaaacttccgaaagccattt

SEQ ID NO: 502 - RNA, 21 nt, synthetic construct
  source 1..21: mol_type = other RNA
caaaagaaggtctagaagagg

SEQ ID NO: 503 - RNA, 21 nt, synthetic construct
  source 1..21: mol_type = other RNA
caaagctgcctgcctagggct

SEQ ID NO: 504 - RNA, 21 nt, synthetic construct
  source 1..21: mol_type = other RNA
caaaggaacgaatggagaaag

SEQ ID NO: 505 - RNA, 21 nt, synthetic construct
  source 1..21: mol_type = other RNA
caacaagcagaaagggggctg

SEQ ID NO: 506 - RNA, 21 nt, synthetic construct
  source 1..21: mol_type = other RNA
caagcagaaagggggctgcaa

SEQ ID NO: 507 - RNA, 21 nt, synthetic construct
  source 1..21: mol_type = other RNA
cacaccttccctgagtcagag

SEQ ID NO: 508 - RNA, 21 nt, synthetic construct
  source 1..21: mol_type = other RNA
caccttccctgagtcagagcc

SEQ ID NO: 509 - RNA, 21 nt, synthetic construct
  source 1..21: mol_type = other RNA
cactagatacgtcgaagaaga

SEQ ID NO: 510 - RNA, 21 nt, synthetic construct
  source 1..21: mol_type = other RNA
cactttctccattcgttcctt

SEQ ID NO: 511 - RNA, 21 nt, synthetic construct
  source 1..21: mol_type = other RNA
cagaaagggggctgcaaagct

SEQ ID NO: 512 - RNA, 21 nt, synthetic construct
  source 1..21: mol_type = other RNA
cagagcctgcaaaaagcaaag

SEQ ID NO: 513 - RNA, 21 nt, synthetic construct
  source 1..21: mol_type = other RNA
cagccccctttctgcttgttg

SEQ ID NO: 514 - RNA, 21 nt, synthetic construct
  source 1..21: mol_type = other RNA
cagctttgcagccccctttct

SEQ ID NO: 515 - RNA, 21 nt, synthetic construct
  source 1..21: mol_type = other RNA
caggaaacgtagccctaggca

SEQ ID NO: 516 - RNA, 21 nt, synthetic construct
  source 1..21: mol_type = other RNA
caggcagctttgcagccccct

SEQ ID NO: 517 - RNA, 21 nt, synthetic construct
  source 1..21: mol_type = other RNA
caggctctgactcagggaagg

SEQ ID NO: 518 - RNA, 21 nt, synthetic construct
  source 1..21: mol_type = other RNA
cagggaaggtgtgcattatcc

SEQ ID NO: 519 - RNA, 21 nt, synthetic construct
  source 1..21: mol_type = other RNA
cattatccactagatacgtcg

SEQ ID NO: 520 - RNA, 21 nt, synthetic construct
  source 1..21: mol_type = other RNA
cattcgttcctttgctttttg

SEQ ID NO: 521 - RNA, 21 nt, synthetic construct
  source 1..21: mol_type = other RNA
catttatttcgaccctaattg

SEQ ID NO: 522 - RNA, 21 nt, synthetic construct
  source 1..21: mol_type = other RNA
catttctccaaaagaaggtct

SEQ ID NO: 523 - RNA, 21 nt, synthetic construct
  source 1..21: mol_type = other RNA
ccaaaagaaggtctagaagag

SEQ ID NO: 524 - RNA, 21 nt, synthetic construct
  source 1..21: mol_type = other RNA
ccactagatacgtcgaagaag

SEQ ID NO: 525 - RNA, 21 nt, synthetic construct
  source 1..21: mol_type = other RNA
ccaggaaacgtagccctaggc

SEQ ID NO: 526 - RNA, 21 nt, synthetic construct
  source 1..21: mol_type = other RNA
ccattcgttcctttgcttttt

SEQ ID NO: 527 - RNA, 21 nt, synthetic construct
  source 1..21: mol_type = other RNA
ccatttctccaaaagaaggtc

SEQ ID NO: 528 - RNA, 21 nt, synthetic construct
  source 1..21: mol_type = other RNA
ccccctttctgcttgttgcac

SEQ ID NO: 529 - RNA, 21 nt, synthetic construct
  source 1..21: mol_type = other RNA
cccctttctgcttgttgcact

SEQ ID NO: 530 - RNA, 21 nt, synthetic construct
  source 1..21: mol_type = other RNA
ccctaattggtttccctcttc

SEQ ID NO: 531 - RNA, 21 nt, synthetic construct
  source 1..21: mol_type = other RNA
ccctaggcaggcagctttgca

SEQ ID NO: 532 - RNA, 21 nt, synthetic construct
  source 1..21: mol_type = other RNA
ccctcttcttcgacgtatcta

SEQ ID NO: 533 - RNA, 21 nt, synthetic construct
  source 1..21: mol_type = other RNA
ccctgagtcagagcctgcaaa

SEQ ID NO: 534 - RNA, 21 nt, synthetic construct
  source 1..21: mol_type = other RNA
ccctttctgcttgttgcactt

SEQ ID NO: 535 - RNA, 21 nt, synthetic construct
  source 1..21: mol_type = other RNA
ccgaaagccatttctccaaaa

SEQ ID NO: 536 - RNA, 21 nt, synthetic construct
  source 1..21: mol_type = other RNA
cctaattggtttccctcttct

SEQ ID NO: 537 - RNA, 21 nt, synthetic construct
  source 1..21: mol_type = other RNA
cctaggcaggcagctttgcag

SEQ ID NO: 538 - RNA, 21 nt, synthetic construct
  source 1..21: mol_type = other RNA
cctagggctacgtttcctggc

SEQ ID NO: 539 - RNA, 21 nt, synthetic construct
  source 1..21: mol_type = other RNA
cctcctcctcctcctcttcta

SEQ ID NO: 540 - RNA, 21 nt, synthetic construct
  source 1..21: mol_type = other RNA
cctcctcctcctcttctagac

SEQ ID NO: 541 - RNA, 21 nt, synthetic construct
  source 1..21: mol_type = other RNA
cctcctcctcttctagacctt

SEQ ID NO: 542 - RNA, 21 nt, synthetic construct
  source 1..21: mol_type = other RNA
cctcctcttctagaccttctt

SEQ ID NO: 543 - RNA, 21 nt, synthetic construct
  source 1..21: mol_type = other RNA
cctcttctagaccttcttttg

SEQ ID NO: 544 - RNA, 21 nt, synthetic construct
  source 1..21: mol_type = other RNA
cctcttcttcgacgtatctag

SEQ ID NO: 545 - RNA, 21 nt, synthetic construct
  source 1..21: mol_type = other RNA
cctgagtcagagcctgcaaaa

SEQ ID NO: 546 - RNA, 21 nt, synthetic construct
  source 1..21: mol_type = other RNA
cctgcaaaaagcaaaggaacg

SEQ ID NO: 547 - RNA, 21 nt, synthetic construct
  source 1..21: mol_type = other RNA
cctgcctagggctacgtttcc

SEQ ID NO: 548 - RNA, 21 nt, synthetic construct
  source 1..21: mol_type = other RNA
cctggcaaaacttccgaaagc

SEQ ID NO: 549 - RNA, 21 nt, synthetic construct
  source 1..21: mol_type = other RNA
ccttccctgagtcagagcctg

SEQ ID NO: 550 - RNA, 21 nt, synthetic construct
  source 1..21: mol_type = other RNA
ccttctcctcctcctcctcct

SEQ ID NO: 551 - RNA, 21 nt, synthetic construct
  source 1..21: mol_type = other RNA
ccttcttttggagaaatggct

SEQ ID NO: 552 - RNA, 21 nt, synthetic construct
  source 1..21: mol_type = other RNA
cctttctgcttgttgcacttt

SEQ ID NO: 553 - RNA, 21 nt, synthetic construct
  source 1..21: mol_type = other RNA
cctttgctttttgcaggctct

SEQ ID NO: 554 - RNA, 21 nt, synthetic construct
  source 1..21: mol_type = other RNA
cgaaagccatttctccaaaag

SEQ ID NO: 555 - RNA, 21 nt, synthetic construct
  source 1..21: mol_type = other RNA
cgaagaagagggaaaccaatt

SEQ ID NO: 556 - RNA, 21 nt, synthetic construct
  source 1..21: mol_type = other RNA
cgaatggagaaagtgcaacaa

SEQ ID NO: 557 - RNA, 21 nt, synthetic construct
  source 1..21: mol_type = other RNA
cgaccctaattggtttccctc

SEQ ID NO: 558 - RNA, 21 nt, synthetic construct
  source 1..21: mol_type = other RNA
cgacgtatctagtggataatg

SEQ ID NO: 559 - RNA, 21 nt, synthetic construct
  source 1..21: mol_type = other RNA
cggaagttttgccaggaaacg

SEQ ID NO: 560 - RNA, 21 nt, synthetic construct
  source 1..21: mol_type = other RNA
cgtagccctaggcaggcagct

SEQ ID NO: 561 - RNA, 21 nt, synthetic construct
  source 1..21: mol_type = other RNA
cgtatctagtggataatgcac

SEQ ID NO: 562 - RNA, 21 nt, synthetic construct
  source 1..21: mol_type = other RNA
cgtcgaagaagagggaaacca

SEQ ID NO: 563 - RNA, 21 nt, synthetic construct
  source 1..21: mol_type = other RNA
cgttcctttgctttttgcagg

SEQ ID NO: 564 - RNA, 21 nt, synthetic construct
  source 1..21: mol_type = other RNA
cgtttcctggcaaaacttccg

SEQ ID NO: 565 - RNA, 21 nt, synthetic construct
  source 1..21: mol_type = other RNA
ctaattggtttccctcttctt

SEQ ID NO: 566 - RNA, 21 nt, synthetic construct
  source 1..21: mol_type = other RNA
ctacgtttcctggcaaaactt

SEQ ID NO: 567 - RNA, 21 nt, synthetic construct
  source 1..21: mol_type = other RNA
ctagaagaggaggaggaggag

SEQ ID NO: 568 - RNA, 21 nt, synthetic construct
  source 1..21: mol_type = other RNA
ctagaccttcttttggagaaa

SEQ ID NO: 569 - RNA, 21 nt, synthetic construct
  source 1..21: mol_type = other RNA
ctagatacgtcgaagaagagg

SEQ ID NO: 570 - RNA, 21 nt, synthetic construct
  source 1..21: mol_type = other RNA
ctaggcaggcagctttgcagc

SEQ ID NO: 571 - RNA, 21 nt, synthetic construct
  source 1..21: mol_type = other RNA
ctagggctacgtttcctggca

SEQ ID NO: 572 - RNA, 21 nt, synthetic construct
  source 1..21: mol_type = other RNA
ctagtggataatgcacacctt

SEQ ID NO: 573 - RNA, 21 nt, synthetic construct
  source 1..21: mol_type = other RNA
ctcagggaaggtgtgcattat

SEQ ID NO: 574 - RNA, 21 nt, synthetic construct
  source 1..21: mol_type = other RNA
ctccaaaagaaggtctagaag

SEQ ID NO: 575 - RNA, 21 nt, synthetic construct
  source 1..21: mol_type = other RNA
ctccattcgttcctttgcttt

SEQ ID NO: 576 - RNA, 21 nt, synthetic construct
  source 1..21: mol_type = other RNA
ctcctcctcctcctcctcttc

SEQ ID NO: 577 - RNA, 21 nt, synthetic construct
  source 1..21: mol_type = other RNA
ctcctcctcctcctcttctag

SEQ ID NO: 578 - RNA, 21 nt, synthetic construct
  source 1..21: mol_type = other RNA
ctcctcctcctcttctagacc

SEQ ID NO: 579 - RNA, 21 nt, synthetic construct
  source 1..21: mol_type = other RNA
ctcctcctcttctagaccttc

SEQ ID NO: 580 - RNA, 21 nt, synthetic construct
  source 1..21: mol_type = other RNA
ctcctcttctagaccttcttt

SEQ ID NO: 581 - RNA, 21 nt, synthetic construct
  source 1..21: mol_type = other RNA
ctccttctcctcctcctcctc

SEQ ID NO: 582 - RNA, 21 nt, synthetic construct
  source 1..21: mol_type = other RNA
ctctgactcagggaaggtgtg

SEQ ID NO: 583 - RNA, 21 nt, synthetic construct
  source 1..21: mol_type = other RNA
ctcttctagaccttcttttgg

SEQ ID NO: 584 - RNA, 21 nt, synthetic construct
  source 1..21: mol_type = other RNA
ctcttcttcgacgtatctagt

SEQ ID NO: 585 - RNA, 21 nt, synthetic construct
  source 1..21: mol_type = other RNA
ctgactcagggaaggtgtgca

SEQ ID NO: 586 - RNA, 21 nt, synthetic construct
  source 1..21: mol_type = other RNA
ctgagtcagagcctgcaaaaa

SEQ ID NO: 587 - RNA, 21 nt, synthetic construct
  source 1..21: mol_type = other RNA
ctgcaaaaagcaaaggaacga

SEQ ID NO: 588 - RNA, 21 nt, synthetic construct
  source 1..21: mol_type = other RNA
ctgcaaagctgcctgcctagg

SEQ ID NO: 589 - RNA, 21 nt, synthetic construct
  source 1..21: mol_type = other RNA
ctgcctagggctacgtttcct

SEQ ID NO: 590 - RNA, 21 nt, synthetic construct
  source 1..21: mol_type = other RNA
ctgcctgcctagggctacgtt

SEQ ID NO: 591 - RNA, 21 nt, synthetic construct
  source 1..21: mol_type = other RNA
ctgcttgttgcactttctcca

SEQ ID NO: 592 - RNA, 21 nt, synthetic construct
  source 1..21: mol_type = other RNA
ctggcaaaacttccgaaagcc

SEQ ID NO: 593 - RNA, 21 nt, synthetic construct
  source 1..21: mol_type = other RNA
cttccctgagtcagagcctgc

SEQ ID NO: 594 - RNA, 21 nt, synthetic construct
  source 1..21: mol_type = other RNA
cttccgaaagccatttctcca

SEQ ID NO: 595 - RNA, 21 nt, synthetic construct
  source 1..21: mol_type = other RNA
cttcgacgtatctagtggata

SEQ ID NO: 596 - RNA, 21 nt, synthetic construct
  source 1..21: mol_type = other RNA
cttctagaccttcttttggag

SEQ ID NO: 597 - RNA, 21 nt, synthetic construct
  source 1..21: mol_type = other RNA
cttctcctcctcctcctcctc

SEQ ID NO: 598 - RNA, 21 nt, synthetic construct
  source 1..21: mol_type = other RNA
cttcttcgacgtatctagtgg

SEQ ID NO: 599 - RNA, 21 nt, synthetic construct
  source 1..21: mol_type = other RNA
cttcttttggagaaatggctt

SEQ ID NO: 600 - RNA, 21 nt, synthetic construct
  source 1..21: mol_type = other RNA
cttgttgcactttctccattc

SEQ ID NO: 601 - RNA, 21 nt, synthetic construct
  source 1..21: mol_type = other RNA
ctttcggaagttttgccagga

SEQ ID NO: 602 - RNA, 21 nt, synthetic construct
  source 1..21: mol_type = other RNA
ctttctccattcgttcctttg

SEQ ID NO: 603 - RNA, 21 nt, synthetic construct
  source 1..21: mol_type = other RNA
ctttctgcttgttgcactttc

SEQ ID NO: 604 - RNA, 21 nt, synthetic construct
  source 1..21: mol_type = other RNA
ctttgcagccccctttctgct

SEQ ID NO: 605 - RNA, 21 nt, synthetic construct
  source 1..21: mol_type = other RNA
ctttgctttttgcaggctctg

SEQ ID NO: 606 - RNA, 21 nt, synthetic construct
  source 1..21: mol_type = other RNA
cttttggagaaatggctttcg

SEQ ID NO: 607 - RNA, 21 nt, synthetic construct
  source 1..21: mol_type = other RNA
ctttttgcaggctctgactca

SEQ ID NO: 608 - RNA, 21 nt, synthetic construct
  source 1..21: mol_type = other RNA
gaaacgtagccctaggcaggc

SEQ ID NO: 609 - RNA, 21 nt, synthetic construct
  source 1..21: mol_type = other RNA
gaaagccatttctccaaaaga

SEQ ID NO: 610 - RNA, 21 nt, synthetic construct
  source 1..21: mol_type = other RNA
gaaagggggctgcaaagctgc

SEQ ID NO: 611 - RNA, 21 nt, synthetic construct
  source 1..21: mol_type = other RNA
gaaagtgcaacaagcagaaag

SEQ ID NO: 612 - RNA, 21 nt, synthetic construct
  source 1..21: mol_type = other RNA
gaaatggctttcggaagtttt

SEQ ID NO: 613 - RNA, 21 nt, synthetic construct
  source 1..21: mol_type = other RNA
gaacgaatggagaaagtgcaa

SEQ ID NO: 614 - RNA, 21 nt, synthetic construct
  source 1..21: mol_type = other RNA
gaagaagagggaaaccaatta

SEQ ID NO: 615 - RNA, 21 nt, synthetic construct
  source 1..21: mol_type = other RNA
gaagagggaaaccaattaggg

SEQ ID NO: 616 - RNA, 21 nt, synthetic construct
  source 1..21: mol_type = other RNA
gaaggtctagaagaggaggag

SEQ ID NO: 617 - RNA, 21 nt, synthetic construct
  source 1..21: mol_type = other RNA
gaaggtgtgcattatccacta

SEQ ID NO: 618 - RNA, 21 nt, synthetic construct
  source 1..21: mol_type = other RNA
gaagttttgccaggaaacgta

SEQ ID NO: 619 - RNA, 21 nt, synthetic construct
  source 1..21: mol_type = other RNA
gaatggagaaagtgcaacaag

SEQ ID NO: 620 - RNA, 21 nt, synthetic construct
  source 1..21: mol_type = other RNA
gaccctaattggtttccctct

SEQ ID NO: 621 - RNA, 21 nt, synthetic construct
  source 1..21: mol_type = other RNA
gaccttcttttggagaaatgg

SEQ ID NO: 622 - RNA, 21 nt, synthetic construct
  source 1..21: mol_type = other RNA
gacgtatctagtggataatgc

SEQ ID NO: 623 - RNA, 21 nt, synthetic construct
  source 1..21: mol_type = other RNA
gactcagggaaggtgtgcatt

SEQ ID NO: 624 - RNA, 21 nt, synthetic construct
  source 1..21: mol_type = other RNA
gagaaagtgcaacaagcagaa

SEQ ID NO: 625 - RNA, 21 nt, synthetic construct
  source 1..21: mol_type = other RNA
gagaaatggctttcggaagtt

SEQ ID NO: 626 - RNA, 21 nt, synthetic construct
  source 1..21: mol_type = other RNA
gagcctgcaaaaagcaaagga

SEQ ID NO: 627 - RNA, 21 nt, synthetic construct
  source 1..21: mol_type = other RNA
gagggaaaccaattagggtcg

SEQ ID NO: 628 - RNA, 21 nt, synthetic construct
  source 1..21: mol_type = other RNA
gagtcagagcctgcaaaaagc

SEQ ID NO: 629 - RNA, 21 nt, synthetic construct
  source 1..21: mol_type = other RNA
gataatgcacaccttccctga

SEQ ID NO: 630 - RNA, 21 nt, synthetic construct
  source 1..21: mol_type = other RNA
gatacgtcgaagaagagggaa

SEQ ID NO: 631 - RNA, 21 nt, synthetic construct
  source 1..21: mol_type = other RNA
gcaaaaagcaaaggaacgaat

SEQ ID NO: 632 - RNA, 21 nt, synthetic construct
  source 1..21: mol_type = other RNA
gcaaaacttccgaaagccatt

SEQ ID NO: 633 - RNA, 21 nt, synthetic construct
  source 1..21: mol_type = other RNA
gcaaagctgcctgcctagggc

SEQ ID NO: 634 - RNA, 21 nt, synthetic construct
  source 1..21: mol_type = other RNA
gcaaaggaacgaatggagaaa

SEQ ID NO: 635 - RNA, 21 nt, synthetic construct
  source 1..21: mol_type = other RNA
gcaacaagcagaaagggggct

SEQ ID NO: 636 - RNA, 21 nt, synthetic construct
  source 1..21: mol_type = other RNA
gcacaccttccctgagtcaga

SEQ ID NO: 637 - RNA, 21 nt, synthetic construct
  source 1..21: mol_type = other RNA
gcactttctccattcgttcct

SEQ ID NO: 638 - RNA, 21 nt, synthetic construct
  source 1..21: mol_type = other RNA
gcagaaagggggctgcaaagc

SEQ ID NO: 639 - RNA, 21 nt, synthetic construct
  source 1..21: mol_type = other RNA
gcagccccctttctgcttgtt

SEQ ID NO: 640 - RNA, 21 nt, synthetic construct
  source 1..21: mol_type = other RNA
gcagctttgcagccccctttc

SEQ ID NO: 641 - RNA, 21 nt, synthetic construct
  source 1..21: mol_type = other RNA
gcaggcagctttgcagccccc

SEQ ID NO: 642 - RNA, 21 nt, synthetic construct
  source 1..21: mol_type = other RNA
gcaggctctgactcagggaag

SEQ ID NO: 643 - RNA, 21 nt, synthetic construct
  source 1..21: mol_type = other RNA
gcattatccactagatacgtc

SEQ ID NO: 644 - RNA, 21 nt, synthetic construct
  source 1..21: mol_type = other RNA
gcatttatttcgaccctaatt

SEQ ID NO: 645 - RNA, 21 nt, synthetic construct
  source 1..21: mol_type = other RNA
gccaggaaacgtagccctagg

SEQ ID NO: 646 - RNA, 21 nt, synthetic construct
  source 1..21: mol_type = other RNA
gccatttctccaaaagaaggt

SEQ ID NO: 647 - RNA, 21 nt, synthetic construct
  source 1..21: mol_type = other RNA
gccccctttctgcttgttgca

SEQ ID NO: 648 - RNA, 21 nt, synthetic construct
  source 1..21: mol_type = other RNA
gccctaggcaggcagctttgc

SEQ ID NO: 649 - RNA, 21 nt, synthetic construct
  source 1..21: mol_type = other RNA
gcctagggctacgtttcctgg

SEQ ID NO: 650 - RNA, 21 nt, synthetic construct
  source 1..21: mol_type = other RNA
gcctgcaaaaagcaaaggaac

SEQ ID NO: 651 - RNA, 21 nt, synthetic construct
  source 1..21: mol_type = other RNA
gcctgcctagggctacgtttc

SEQ ID NO: 652 - RNA, 21 nt, synthetic construct
  source 1..21: mol_type = other RNA
gctacgtttcctggcaaaact

SEQ ID NO: 653 - RNA, 21 nt, synthetic construct
  source 1..21: mol_type = other RNA
gctctgactcagggaaggtgt

SEQ ID NO: 654 - RNA, 21 nt, synthetic construct
  source 1..21: mol_type = other RNA
gctgcaaagctgcctgcctag

SEQ ID NO: 655 - RNA, 21 nt, synthetic construct
  source 1..21: mol_type = other RNA
gctgcctgcctagggctacgt

SEQ ID NO: 656 - RNA, 21 nt, synthetic construct
  source 1..21: mol_type = other RNA
gcttgttgcactttctccatt

SEQ ID NO: 657 - RNA, 21 nt, synthetic construct
  source 1..21: mol_type = other RNA
gctttcggaagttttgccagg

SEQ ID NO: 658 - RNA, 21 nt, synthetic construct
  source 1..21: mol_type = other RNA
gctttgcagccccctttctgc

SEQ ID NO: 659 - RNA, 21 nt, synthetic construct
  source 1..21: mol_type = other RNA
gctttttgcaggctctgactc

SEQ ID NO: 660 - RNA, 21 nt, synthetic construct
  source 1..21: mol_type = other RNA
ggaaacgtagccctaggcagg

SEQ ID NO: 661 - RNA, 21 nt, synthetic construct
  source 1..21: mol_type = other RNA
ggaacgaatggagaaagtgca

SEQ ID NO: 662 - RNA, 21 nt, synthetic construct
  source 1..21: mol_type = other RNA
ggaaggtgtgcattatccact

SEQ ID NO: 663 - RNA, 21 nt, synthetic construct
  source 1..21: mol_type = other RNA
ggaagttttgccaggaaacgt

SEQ ID NO: 664 - RNA, 21 nt, synthetic construct
  source 1..21: mol_type = other RNA
ggagaaagtgcaacaagcaga

SEQ ID NO: 665 - RNA, 21 nt, synthetic construct
  source 1..21: mol_type = other RNA
ggagaaatggctttcggaagt

SEQ ID NO: 666 - RNA, 21 nt, synthetic construct
  source 1..21: mol_type = other RNA
ggataatgcacaccttccctg

SEQ ID NO: 667 - RNA, 21 nt, synthetic construct
  source 1..21: mol_type = other RNA
ggcaaaacttccgaaagccat

SEQ ID NO: 668 - RNA, 21 nt, synthetic construct
  source 1..21: mol_type = other RNA
ggcagctttgcagcccccttt

SEQ ID NO: 669 - RNA, 21 nt, synthetic construct
  source 1..21: mol_type = other RNA
ggcaggcagctttgcagcccc

SEQ ID NO: 670 - RNA, 21 nt, synthetic construct
  source 1..21: mol_type = other RNA
ggctacgtttcctggcaaaac

SEQ ID NO: 671 - RNA, 21 nt, synthetic construct
  source 1..21: mol_type = other RNA
ggctctgactcagggaaggtg

SEQ ID NO: 672 - RNA, 21 nt, synthetic construct
  source 1..21: mol_type = other RNA
ggctgcaaagctgcctgccta

SEQ ID NO: 673 - RNA, 21 nt, synthetic construct
  source 1..21: mol_type = other RNA
ggctttcggaagttttgccag

SEQ ID NO: 674 - RNA, 21 nt, synthetic construct
  source 1..21: mol_type = other RNA
gggaaaccaattagggtcgaa

SEQ ID NO: 675 - RNA, 21 nt, synthetic construct
  source 1..21: mol_type = other RNA
gggaaggtgtgcattatccac

SEQ ID NO: 676 - RNA, 21 nt, synthetic construct
  source 1..21: mol_type = other RNA
gggctacgtttcctggcaaaa

SEQ ID NO: 677 - RNA, 21 nt, synthetic construct
  source 1..21: mol_type = other RNA
gggctgcaaagctgcctgcct

SEQ ID NO: 678 - RNA, 21 nt, synthetic construct
  source 1..21: mol_type = other RNA
ggggctgcaaagctgcctgcc

SEQ ID NO: 679 - RNA, 21 nt, synthetic construct
  source 1..21: mol_type = other RNA
gggggctgcaaagctgcctgc

SEQ ID NO: 680 - RNA, 21 nt, synthetic construct
  source 1..21: mol_type = other RNA
ggtctagaagaggaggaggag

SEQ ID NO: 681 - RNA, 21 nt, synthetic construct
  source 1..21: mol_type = other RNA
ggtgtgcattatccactagat

SEQ ID NO: 682 - RNA, 21 nt, synthetic construct
  source 1..21: mol_type = other RNA
ggtttccctcttcttcgacgt

SEQ ID NO: 683 - RNA, 21 nt, synthetic construct
  source 1..21: mol_type = other RNA
gtagccctaggcaggcagctt

SEQ ID NO: 684 - RNA, 21 nt, synthetic construct
  source 1..21: mol_type = other RNA
gtatctagtggataatgcaca

SEQ ID NO: 685 - RNA, 21 nt, synthetic construct
  source 1..21: mol_type = other RNA
gtcagagcctgcaaaaagcaa

SEQ ID NO: 686 - RNA, 21 nt, synthetic construct
  source 1..21: mol_type = other RNA
gtcgaagaagagggaaaccaa

SEQ ID NO: 687 - RNA, 21 nt, synthetic construct
  source 1..21: mol_type = other RNA
gtctagaagaggaggaggagg

SEQ ID NO: 688 - RNA, 21 nt, synthetic construct
  source 1..21: mol_type = other RNA
gtgcaacaagcagaaaggggg

SEQ ID NO: 689 - RNA, 21 nt, synthetic construct
  source 1..21: mol_type = other RNA
gtgcattatccactagatacg

SEQ ID NO: 690 - RNA, 21 nt, synthetic construct
  source 1..21: mol_type = other RNA
gtggataatgcacaccttccc

SEQ ID NO: 691 - RNA, 21 nt, synthetic construct
  source 1..21: mol_type = other RNA
gtgtgcattatccactagata

SEQ ID NO: 692 - RNA, 21 nt, synthetic construct
  source 1..21: mol_type = other RNA
gttcctttgctttttgcaggc

SEQ ID NO: 693 - RNA, 21 nt, synthetic construct
  source 1..21: mol_type = other RNA
gttgcactttctccattcgtt

SEQ ID NO: 694 - RNA, 21 nt, synthetic construct
  source 1..21: mol_type = other RNA
gtttccctcttcttcgacgta

SEQ ID NO: 695 - RNA, 21 nt, synthetic construct
  source 1..21: mol_type = other RNA
gtttcctggcaaaacttccga

SEQ ID NO: 696 - RNA, 21 nt, synthetic construct
  source 1..21: mol_type = other RNA
gttttgccaggaaacgtagcc

SEQ ID NO: 697 - RNA, 21 nt, synthetic construct
  source 1..21: mol_type = other RNA
taatgcacaccttccctgagt

SEQ ID NO: 698 - RNA, 21 nt, synthetic construct
  source 1..21: mol_type = other RNA
taattggtttccctcttcttc

SEQ ID NO: 699 - RNA, 21 nt, synthetic construct
  source 1..21: mol_type = other RNA
tacgtcgaagaagagggaaac

SEQ ID NO: 700 - RNA, 21 nt, synthetic construct
  source 1..21: mol_type = other RNA
tacgtttcctggcaaaacttc

SEQ ID NO: 701 - RNA, 21 nt, synthetic construct
  source 1..21: mol_type = other RNA
tagaagaggaggaggaggagg

SEQ ID NO: 702 - RNA, 21 nt, synthetic construct
  source 1..21: mol_type = other RNA
tagaccttcttttggagaaat

SEQ ID NO: 703 - RNA, 21 nt, synthetic construct
  source 1..21: mol_type = other RNA
tagatacgtcgaagaagaggg

SEQ ID NO: 704 - RNA, 21 nt, synthetic construct
  source 1..21: mol_type = other RNA
tagccctaggcaggcagcttt

SEQ ID NO: 705 - RNA, 21 nt, synthetic construct
  source 1..21: mol_type = other RNA
taggcaggcagctttgcagcc

SEQ ID NO: 706 - RNA, 21 nt, synthetic construct
  source 1..21: mol_type = other RNA
tagggctacgtttcctggcaa

SEQ ID NO: 707 - RNA, 21 nt, synthetic construct
  source 1..21: mol_type = other RNA
tagtggataatgcacaccttc

SEQ ID NO: 708 - RNA, 21 nt, synthetic construct
  source 1..21: mol_type = other RNA
tatccactagatacgtcgaag

SEQ ID NO: 709 - RNA, 21 nt, synthetic construct
  source 1..21: mol_type = other RNA
tatctagtggataatgcacac

SEQ ID NO: 710 - RNA, 21 nt, synthetic construct
  source 1..21: mol_type = other RNA
tatttcgaccctaattggttt

SEQ ID NO: 711 - RNA, 21 nt, synthetic construct
  source 1..21: mol_type = other RNA
tcagagcctgcaaaaagcaaa

SEQ ID NO: 712 - RNA, 21 nt, synthetic construct
  source 1..21: mol_type = other RNA
tcagggaaggtgtgcattatc

SEQ ID NO: 713 - RNA, 21 nt, synthetic construct
  source 1..21: mol_type = other RNA
tccaaaagaaggtctagaaga

SEQ ID NO: 714 - RNA, 21 nt, synthetic construct
  source 1..21: mol_type = other RNA
tccactagatacgtcgaagaa

SEQ ID NO: 715 - RNA, 21 nt, synthetic construct
  source 1..21: mol_type = other RNA
tccattcgttcctttgctttt

SEQ ID NO: 716 - RNA, 21 nt, synthetic construct
  source 1..21: mol_type = other RNA
tccctcttcttcgacgtatct

SEQ ID NO: 717 - RNA, 21 nt, synthetic construct
  source 1..21: mol_type = other RNA
tccctgagtcagagcctgcaa

SEQ ID NO: 718 - RNA, 21 nt, synthetic construct
  source 1..21: mol_type = other RNA
tccgaaagccatttctccaaa

SEQ ID NO: 719 - RNA, 21 nt, synthetic construct
  source 1..21: mol_type = other RNA
tcctcctcctcctcctcttct

SEQ ID NO: 720 - RNA, 21 nt, synthetic construct
  source 1..21: mol_type = other RNA
tcctcctcctcctcttctaga

SEQ ID NO: 721 - RNA, 21 nt, synthetic construct
  source 1..21: mol_type = other RNA
tcctcctcctcttctagacct

SEQ ID NO: 722 - RNA, 21 nt, synthetic construct
  source 1..21: mol_type = other RNA
tcctcctcttctagaccttct

SEQ ID NO: 723 - RNA, 21 nt, synthetic construct
  source 1..21: mol_type = other RNA
tcctcttctagaccttctttt

SEQ ID NO: 724 - RNA, 21 nt, synthetic construct
  source 1..21: mol_type = other RNA
tcctggcaaaacttccgaaag

SEQ ID NO: 725 - RNA, 21 nt, synthetic construct
  source 1..21: mol_type = other RNA
tccttctcctcctcctcctcc

SEQ ID NO: 726 - RNA, 21 nt, synthetic construct
  source 1..21: mol_type = other RNA
tcctttgctttttgcaggctc

SEQ ID NO: 727 - RNA, 21 nt, synthetic construct
  source 1..21: mol_type = other RNA
tcgaagaagagggaaaccaat

SEQ ID NO: 728 - RNA, 21 nt, synthetic construct
  source 1..21: mol_type = other RNA
tcgaccctaattggtttccct

SEQ ID NO: 729 - RNA, 21 nt, synthetic construct
  source 1..21: mol_type = other RNA
tcgacgtatctagtggataat

SEQ ID NO: 730 - RNA, 21 nt, synthetic construct
  source 1..21: mol_type = other RNA
tcggaagttttgccaggaaac

SEQ ID NO: 731 - RNA, 21 nt, synthetic construct
  source 1..21: mol_type = other RNA
tcgttcctttgctttttgcag

SEQ ID NO: 732 - RNA, 21 nt, synthetic construct
  source 1..21: mol_type = other RNA
tctagaagaggaggaggagga

SEQ ID NO: 733 - RNA, 21 nt, synthetic construct
  source 1..21: mol_type = other RNA
tctagaccttcttttggagaa

SEQ ID NO: 734 - RNA, 21 nt, synthetic construct
  source 1..21: mol_type = other RNA
tctagtggataatgcacacct

SEQ ID NO: 735 - RNA, 21 nt, synthetic construct
  source 1..21: mol_type = other RNA
tctccaaaagaaggtctagaa

SEQ ID NO: 736 - RNA, 21 nt, synthetic construct
  source 1..21: mol_type = other RNA
tctccattcgttcctttgctt

SEQ ID NO: 737 - RNA, 21 nt, synthetic construct
  source 1..21: mol_type = other RNA
tctcctcctcctcctcctctt

SEQ ID NO: 738 - RNA, 21 nt, synthetic construct
  source 1..21: mol_type = other RNA
tctgactcagggaaggtgtgc

SEQ ID NO: 739 - RNA, 21 nt, synthetic construct
  source 1..21: mol_type = other RNA
tctgcttgttgcactttctcc

SEQ ID NO: 740 - RNA, 21 nt, synthetic construct
  source 1..21: mol_type = other RNA
tcttcgacgtatctagtggat

SEQ ID NO: 741 - RNA, 21 nt, synthetic construct
  source 1..21: mol_type = other RNA
tcttctagaccttcttttgga

SEQ ID NO: 742 - RNA, 21 nt, synthetic construct
  source 1..21: mol_type = other RNA
tcttcttcgacgtatctagtg

SEQ ID NO: 743 - RNA, 21 nt, synthetic construct
  source 1..21: mol_type = other RNA
tcttttggagaaatggctttc

SEQ ID NO: 744 - RNA, 21 nt, synthetic construct
  source 1..21: mol_type = other RNA
tgactcagggaaggtgtgcat

SEQ ID NO: 745 - RNA, 21 nt, synthetic construct
  source 1..21: mol_type = other RNA
tgagtcagagcctgcaaaaag

SEQ ID NO: 746 - RNA, 21 nt, synthetic construct
  source 1..21: mol_type = other RNA
tgcaaaaagcaaaggaacgaa

SEQ ID NO: 747 - RNA, 21 nt, synthetic construct
  source 1..21: mol_type = other RNA
tgcaaagctgcctgcctaggg

SEQ ID NO: 748 - RNA, 21 nt, synthetic construct
  source 1..21: mol_type = other RNA
tgcaacaagcagaaagggggc

SEQ ID NO: 749 - RNA, 21 nt, synthetic construct
  source 1..21: mol_type = other RNA
tgcacaccttccctgagtcag

SEQ ID NO: 750 - RNA, 21 nt, synthetic construct
  source 1..21: mol_type = other RNA
tgcactttctccattcgttcc

SEQ ID NO: 751 - RNA, 21 nt, synthetic construct
  source 1..21: mol_type = other RNA
tgcagccccctttctgcttgt

SEQ ID NO: 752 - RNA, 21 nt, synthetic construct
  source 1..21: mol_type = other RNA
tgcaggctctgactcagggaa

SEQ ID NO: 753 - RNA, 21 nt, synthetic construct
  source 1..21: mol_type = other RNA
tgcattatccactagatacgt

SEQ ID NO: 754 - RNA, 21 nt, synthetic construct
  source 1..21: mol_type = other RNA
tgccaggaaacgtagccctag

SEQ ID NO: 755 - RNA, 21 nt, synthetic construct
  source 1..21: mol_type = other RNA
tgcctagggctacgtttcctg

SEQ ID NO: 756 - RNA, 21 nt, synthetic construct
  source 1..21: mol_type = other RNA
tgcctgcctagggctacgttt

SEQ ID NO: 757 - RNA, 21 nt, synthetic construct
  source 1..21: mol_type = other RNA
tgcttgttgcactttctccat

SEQ ID NO: 758 - RNA, 21 nt, synthetic construct
  source 1..21: mol_type = other RNA
tgctttttgcaggctctgact

SEQ ID NO: 759 - RNA, 21 nt, synthetic construct
  source 1..21: mol_type = other RNA
tggagaaagtgcaacaagcag

SEQ ID NO: 760 - RNA, 21 nt, synthetic construct
  source 1..21: mol_type = other RNA
tggagaaatggctttcggaag

SEQ ID NO: 761 - RNA, 21 nt, synthetic construct
  source 1..21: mol_type = other RNA
tggataatgcacaccttccct

SEQ ID NO: 762 - RNA, 21 nt, synthetic construct
  source 1..21: mol_type = other RNA
tggcaaaacttccgaaagcca

SEQ ID NO: 763 - RNA, 21 nt, synthetic construct
  source 1..21: mol_type = other RNA
tggctttcggaagttttgcca

SEQ ID NO: 764 - RNA, 21 nt, synthetic construct
  source 1..21: mol_type = other RNA
tggtttccctcttcttcgacg

SEQ ID NO: 765 - RNA, 21 nt, synthetic construct
  source 1..21: mol_type = other RNA
tgtgcattatccactagatac

SEQ ID NO: 766 - RNA, 21 nt, synthetic construct
  source 1..21: mol_type = other RNA
tgttgcactttctccattcgt

SEQ ID NO: 767 - RNA, 21 nt, synthetic construct
  source 1..21: mol_type = other RNA
ttatccactagatacgtcgaa

SEQ ID NO: 768 - RNA, 21 nt, synthetic construct
  source 1..21: mol_type = other RNA
ttatttcgaccctaattggtt

SEQ ID NO: 769 - RNA, 21 nt, synthetic construct
  source 1..21: mol_type = other RNA
ttccctcttcttcgacgtatc

SEQ ID NO: 770 - RNA, 21 nt, synthetic construct
  source 1..21: mol_type = other RNA
ttccctgagtcagagcctgca

SEQ ID NO: 771 - RNA, 21 nt, synthetic construct
  source 1..21: mol_type = other RNA
ttccgaaagccatttctccaa

SEQ ID NO: 772 - RNA, 21 nt, synthetic construct
  source 1..21: mol_type = other RNA
ttcctggcaaaacttccgaaa

SEQ ID NO: 773 - RNA, 21 nt, synthetic construct
  source 1..21: mol_type = other RNA
ttcctttgctttttgcaggct

SEQ ID NO: 774 - RNA, 21 nt, synthetic construct
  source 1..21: mol_type = other RNA
ttcgaccctaattggtttccc

SEQ ID NO: 775 - RNA, 21 nt, synthetic construct
  source 1..21: mol_type = other RNA
ttcgacgtatctagtggataa

SEQ ID NO: 776 - RNA, 21 nt, synthetic construct
  source 1..21: mol_type = other RNA
ttcggaagttttgccaggaaa

SEQ ID NO: 777 - RNA, 21 nt, synthetic construct
  source 1..21: mol_type = other RNA
ttcgttcctttgctttttgca

SEQ ID NO: 778 - RNA, 21 nt, synthetic construct
  source 1..21: mol_type = other RNA
ttctagaccttcttttggaga

SEQ ID NO: 779 - RNA, 21 nt, synthetic construct
  source 1..21: mol_type = other RNA
ttctccaaaagaaggtctaga

SEQ ID NO: 780 - RNA, 21 nt, synthetic construct
  source 1..21: mol_type = other RNA
ttctccattcgttcctttgct

SEQ ID NO: 781 - RNA, 21 nt, synthetic construct
  source 1..21: mol_type = other RNA
ttctcctcctcctcctcctct

SEQ ID NO: 782 - RNA, 21 nt, synthetic construct
  source 1..21: mol_type = other RNA
ttctgcttgttgcactttctc

SEQ ID NO: 783 - RNA, 21 nt, synthetic construct
  source 1..21: mol_type = other RNA
ttcttcgacgtatctagtgga

SEQ ID NO: 784 - RNA, 21 nt, synthetic construct
  source 1..21: mol_type = other RNA
ttcttttggagaaatggcttt

SEQ ID NO: 785 - RNA, 21 nt, synthetic construct
  source 1..21: mol_type = other RNA
ttgcactttctccattcgttc

SEQ ID NO: 786 - RNA, 21 nt, synthetic construct
  source 1..21: mol_type = other RNA
ttgcagccccctttctgcttg

SEQ ID NO: 787 - RNA, 21 nt, synthetic construct
  source 1..21: mol_type = other RNA
ttgcaggctctgactcaggga

SEQ ID NO: 788 - RNA, 21 nt, synthetic construct
  source 1..21: mol_type = other RNA
ttgccaggaaacgtagcccta

SEQ ID NO: 789 - RNA, 21 nt, synthetic construct
  source 1..21: mol_type = other RNA
ttgctttttgcaggctctgac

SEQ ID NO: 790 - RNA, 21 nt, synthetic construct
  source 1..21: mol_type = other RNA
ttggagaaatggctttcggaa

SEQ ID NO: 791 - RNA, 21 nt, synthetic construct
  source 1..21: mol_type = other RNA
ttggtttccctcttcttcgac

SEQ ID NO: 792 - RNA, 21 nt, synthetic construct
  source 1..21: mol_type = other RNA
ttgttgcactttctccattcg

SEQ ID NO: 793 - RNA, 21 nt, synthetic construct
  source 1..21: mol_type = other RNA
tttatttcgaccctaattggt

SEQ ID NO: 794 - RNA, 21 nt, synthetic construct
  source 1..21: mol_type = other RNA
tttccctcttcttcgacgtat

SEQ ID NO: 795 - RNA, 21 nt, synthetic construct
  source 1..21: mol_type = other RNA
tttcctggcaaaacttccgaa

SEQ ID NO: 796 - RNA, 21 nt, synthetic construct
  source 1..21: mol_type = other RNA
tttcgaccctaattggtttcc

SEQ ID NO: 797 - RNA, 21 nt, synthetic construct
  source 1..21: mol_type = other RNA
tttcggaagttttgccaggaa

SEQ ID NO: 798 - RNA, 21 nt, synthetic construct
  source 1..21: mol_type = other RNA
tttctccaaaagaaggtctag

SEQ ID NO: 799 - RNA, 21 nt, synthetic construct
  source 1..21: mol_type = other RNA
tttctccattcgttcctttgc

SEQ ID NO: 800 - RNA, 21 nt, synthetic construct
  source 1..21: mol_type = other RNA
tttctgcttgttgcactttct

SEQ ID NO: 801 - RNA, 21 nt, synthetic construct
  source 1..21: mol_type = other RNA
tttgcagccccctttctgctt

SEQ ID NO: 802 - RNA, 21 nt, synthetic construct
  source 1..21: mol_type = other RNA
tttgcaggctctgactcaggg

SEQ ID NO: 803 - RNA, 21 nt, synthetic construct
  source 1..21: mol_type = other RNA
tttgccaggaaacgtagccct

SEQ ID NO: 804 - RNA, 21 nt, synthetic construct
  source 1..21: mol_type = other RNA
tttgctttttgcaggctctga

SEQ ID NO: 805 - RNA, 21 nt, synthetic construct
  source 1..21: mol_type = other RNA
tttggagaaatggctttcgga

SEQ ID NO: 806 - RNA, 21 nt, synthetic construct
  source 1..21: mol_type = other RNA
ttttgcaggctctgactcagg

SEQ ID NO: 807 - RNA, 21 nt, synthetic construct
  source 1..21: mol_type = other RNA
ttttgccaggaaacgtagccc

SEQ ID NO: 808 - RNA, 21 nt, synthetic construct
  source 1..21: mol_type = other RNA
ttttggagaaatggctttcgg

SEQ ID NO: 809 - RNA, 21 nt, synthetic construct
  source 1..21: mol_type = other RNA
tttttgcaggctctgactcag

SEQ ID NO: 810 - RNA, 22 nt, synthetic construct
  source 1..22: mol_type = other RNA
aaaaagcaaaggaacgaatgga

SEQ ID NO: 811 - RNA, 22 nt, synthetic construct
  source 1..22: mol_type = other RNA
aaaacttccgaaagccatttct

SEQ ID NO: 812 - RNA, 22 nt, synthetic construct
  source 1..22: mol_type = other RNA
aaaagaaggtctagaagaggag

SEQ ID NO: 813 - RNA, 22 nt, synthetic construct
  source 1..22: mol_type = other RNA
aaaagcaaaggaacgaatggag

SEQ ID NO: 814 - RNA, 22 nt, synthetic construct
  source 1..22: mol_type = other RNA
aaacgtagccctaggcaggcag

SEQ ID NO: 815 - RNA, 22 nt, synthetic construct
  source 1..22: mol_type = other RNA
aaacttccgaaagccatttctc

SEQ ID NO: 816 - RNA, 22 nt, synthetic construct
  source 1..22: mol_type = other RNA
aaagaaggtctagaagaggagg

SEQ ID NO: 817 - RNA, 22 nt, synthetic construct
  source 1..22: mol_type = other RNA
aaagcaaaggaacgaatggaga

SEQ ID NO: 818 - RNA, 22 nt, synthetic construct
  source 1..22: mol_type = other RNA
aaagccatttctccaaaagaag

SEQ ID NO: 819 - RNA, 22 nt, synthetic construct
  source 1..22: mol_type = other RNA
aaagctgcctgcctagggctac

SEQ ID NO: 820 - RNA, 22 nt, synthetic construct
  source 1..22: mol_type = other RNA
aaaggaacgaatggagaaagtg

SEQ ID NO: 821 - RNA, 22 nt, synthetic construct
  source 1..22: mol_type = other RNA
aaagggggctgcaaagctgcct

SEQ ID NO: 822 - RNA, 22 nt, synthetic construct
  source 1..22: mol_type = other RNA
aaagtgcaacaagcagaaaggg

SEQ ID NO: 823 - RNA, 22 nt, synthetic construct
  source 1..22: mol_type = other RNA
aaatggctttcggaagttttgc

SEQ ID NO: 824 - RNA, 22 nt, synthetic construct
  source 1..22: mol_type = other RNA
aacaagcagaaagggggctgca

SEQ ID NO: 825 - RNA, 22 nt, synthetic construct
  source 1..22: mol_type = other RNA
aacgaatggagaaagtgcaaca

SEQ ID NO: 826 - RNA, 22 nt, synthetic construct
  source 1..22: mol_type = other RNA
aacgtagccctaggcaggcagc

SEQ ID NO: 827 - RNA, 22 nt, synthetic construct
  source 1..22: mol_type = other RNA
aacttccgaaagccatttctcc

SEQ ID NO: 828 - RNA, 22 nt, synthetic construct
  source 1..22: mol_type = other RNA
aagaagagggaaaccaattagg

SEQ ID NO: 829 - RNA, 22 nt, synthetic construct
  source 1..22: mol_type = other RNA
aagaaggtctagaagaggagga

SEQ ID NO: 830 - RNA, 22 nt, synthetic construct
  source 1..22: mol_type = other RNA
aagagggaaaccaattagggtc

SEQ ID NO: 831 - RNA, 22 nt, synthetic construct
  source 1..22: mol_type = other RNA
aagcaaaggaacgaatggagaa

SEQ ID NO: 832 - RNA, 22 nt, synthetic construct
  source 1..22: mol_type = other RNA
aagcagaaagggggctgcaaag

SEQ ID NO: 833 - RNA, 22 nt, synthetic construct
  source 1..22: mol_type = other RNA
aagccatttctccaaaagaagg

SEQ ID NO: 834 - RNA, 22 nt, synthetic construct
  source 1..22: mol_type = other RNA
aagctgcctgcctagggctacg

SEQ ID NO: 835 - RNA, 22 nt, synthetic construct
  source 1..22: mol_type = other RNA
aaggaacgaatggagaaagtgc

SEQ ID NO: 836 - RNA, 22 nt, synthetic construct
  source 1..22: mol_type = other RNA
aagggggctgcaaagctgcctg

SEQ ID NO: 837 - RNA, 22 nt, synthetic construct
  source 1..22: mol_type = other RNA
aaggtctagaagaggaggagga

SEQ ID NO: 838 - RNA, 22 nt, synthetic construct
  source 1..22: mol_type = other RNA
aaggtgtgcattatccactaga

SEQ ID NO: 839 - RNA, 22 nt, synthetic construct
  source 1..22: mol_type = other RNA
aagtgcaacaagcagaaagggg

SEQ ID NO: 840 - RNA, 22 nt, synthetic construct
  source 1..22: mol_type = other RNA
aagttttgccaggaaacgtagc

SEQ ID NO: 841 - RNA, 22 nt, synthetic construct
  source 1..22: mol_type = other RNA
aatgcacaccttccctgagtca

SEQ ID NO: 842 - RNA, 22 nt, synthetic construct
  source 1..22: mol_type = other RNA
aatggagaaagtgcaacaagca

SEQ ID NO: 843 - RNA, 22 nt, synthetic construct
  source 1..22: mol_type = other RNA
aatggctttcggaagttttgcc

SEQ ID NO: 844 - RNA, 22 nt, synthetic construct
  source 1..22: mol_type = other RNA
aattggtttccctcttcttcga

SEQ ID NO: 845 - RNA, 22 nt, synthetic construct
  source 1..22: mol_type = other RNA
acaagcagaaagggggctgcaa

SEQ ID NO: 846 - RNA, 22 nt, synthetic construct
  source 1..22: mol_type = other RNA
acaccttccctgagtcagagcc

SEQ ID NO: 847 - RNA, 22 nt, synthetic construct
  source 1..22: mol_type = other RNA
accctaattggtttccctcttc

SEQ ID NO: 848 - RNA, 22 nt, synthetic construct
  source 1..22: mol_type = other RNA
accttccctgagtcagagcctg

SEQ ID NO: 849 - RNA, 22 nt, synthetic construct
  source 1..22: mol_type = other RNA
accttcttttggagaaatggct

SEQ ID NO: 850 - RNA, 22 nt, synthetic construct
  source 1..22: mol_type = other RNA
acgaatggagaaagtgcaacaa

SEQ ID NO: 851 - RNA, 22 nt, synthetic construct
  source 1..22: mol_type = other RNA
acgtagccctaggcaggcagct

SEQ ID NO: 852 - RNA, 22 nt, synthetic construct
  source 1..22: mol_type = other RNA
acgtatctagtggataatgcac

SEQ ID NO: 853 - RNA, 22 nt, synthetic construct
  source 1..22: mol_type = other RNA
acgtcgaagaagagggaaacca

SEQ ID NO: 854 - RNA, 22 nt, synthetic construct
  source 1..22: mol_type = other RNA
acgtttcctggcaaaacttccg

SEQ ID NO: 855 - RNA, 22 nt, synthetic construct
  source 1..22: mol_type = other RNA
actagatacgtcgaagaagagg

SEQ ID NO: 856 - RNA, 22 nt, synthetic construct
  source 1..22: mol_type = other RNA
actcagggaaggtgtgcattat

SEQ ID NO: 857 - RNA, 22 nt, synthetic construct
  source 1..22: mol_type = other RNA
acttccgaaagccatttctcca

SEQ ID NO: 858 - RNA, 22 nt, synthetic construct
  source 1..22: mol_type = other RNA
actttctccattcgttcctttg

SEQ ID NO: 859 - RNA, 22 nt, synthetic construct
  source 1..22: mol_type = other RNA
agaaagggggctgcaaagctgc

SEQ ID NO: 860 - RNA, 22 nt, synthetic construct
  source 1..22: mol_type = other RNA
agaaagtgcaacaagcagaaag

SEQ ID NO: 861 - RNA, 22 nt, synthetic construct
  source 1..22: mol_type = other RNA
agaaatggctttcggaagtttt

SEQ ID NO: 862 - RNA, 22 nt, synthetic construct
  source 1..22: mol_type = other RNA
agaagagggaaaccaattaggg

SEQ ID NO: 863 - RNA, 22 nt, synthetic construct
  source 1..22: mol_type = other RNA
agaaggtctagaagaggaggag

SEQ ID NO: 864 - RNA, 22 nt, synthetic construct
  source 1..22: mol_type = other RNA
agaccttcttttggagaaatgg

SEQ ID NO: 865 - RNA, 22 nt, synthetic construct
  source 1..22: mol_type = other RNA
agagcctgcaaaaagcaaagga

SEQ ID NO: 866 - RNA, 22 nt, synthetic construct
  source 1..22: mol_type = other RNA
agagggaaaccaattagggtcg

SEQ ID NO: 867 - RNA, 22 nt, synthetic construct
  source 1..22: mol_type = other RNA
agatacgtcgaagaagagggaa

SEQ ID NO: 868 - RNA, 22 nt, synthetic construct
  source 1..22: mol_type = other RNA
agcaaaggaacgaatggagaaa

SEQ ID NO: 869 - RNA, 22 nt, synthetic construct
  source 1..22: mol_type = other RNA
agcagaaagggggctgcaaagc

SEQ ID NO: 870 - RNA, 22 nt, synthetic construct
  source 1..22: mol_type = other RNA
agccatttctccaaaagaaggt

SEQ ID NO: 871 - RNA, 22 nt, synthetic construct
  source 1..22: mol_type = other RNA
agccccctttctgcttgttgca

SEQ ID NO: 872 - RNA, 22 nt, synthetic construct
  source 1..22: mol_type = other RNA
agccctaggcaggcagctttgc

SEQ ID NO: 873 - RNA, 22 nt, synthetic construct
  source 1..22: mol_type = other RNA
agcctgcaaaaagcaaaggaac

SEQ ID NO: 874 - RNA, 22 nt, synthetic construct
  source 1..22: mol_type = other RNA
agctgcctgcctagggctacgt

SEQ ID NO: 875 - RNA, 22 nt, synthetic construct
  source 1..22: mol_type = other RNA
agctttgcagccccctttctgc

SEQ ID NO: 876 - RNA, 22 nt, synthetic construct
  source 1..22: mol_type = other RNA
aggaaacgtagccctaggcagg

SEQ ID NO: 877 - RNA, 22 nt, synthetic construct
  source 1..22: mol_type = other RNA
aggaacgaatggagaaagtgca

SEQ ID NO: 878 - RNA, 22 nt, synthetic construct
  source 1..22: mol_type = other RNA
aggcagctttgcagcccccttt

SEQ ID NO: 879 - RNA, 22 nt, synthetic construct
  source 1..22: mol_type = other RNA
aggcaggcagctttgcagcccc

SEQ ID NO: 880 - RNA, 22 nt, synthetic construct
  source 1..22: mol_type = other RNA
aggctctgactcagggaaggtg

SEQ ID NO: 881 - RNA, 22 nt, synthetic construct
  source 1..22: mol_type = other RNA
agggaaaccaattagggtcgaa

SEQ ID NO: 882 - RNA, 22 nt, synthetic construct
  source 1..22: mol_type = other RNA
agggaaggtgtgcattatccac

SEQ ID NO: 883 - RNA, 22 nt, synthetic construct
  source 1..22: mol_type = other RNA
agggctacgtttcctggcaaaa

SEQ ID NO: 884 - RNA, 22 nt, synthetic construct
  source 1..22: mol_type = other RNA
agggggctgcaaagctgcctgc

SEQ ID NO: 885 - RNA, 22 nt, synthetic construct
  source 1..22: mol_type = other RNA
aggtctagaagaggaggaggag

SEQ ID NO: 886 - RNA, 22 nt, synthetic construct
  source 1..22: mol_type = other RNA
aggtgtgcattatccactagat

SEQ ID NO: 887 - RNA, 22 nt, synthetic construct
  source 1..22: mol_type = other RNA
agtcagagcctgcaaaaagcaa

SEQ ID NO: 888 - RNA, 22 nt, synthetic construct
  source 1..22: mol_type = other RNA
agtgcaacaagcagaaaggggg

SEQ ID NO: 889 - RNA, 22 nt, synthetic construct
  source 1..22: mol_type = other RNA
agtggataatgcacaccttccc

SEQ ID NO: 890 - RNA, 22 nt, synthetic construct
  source 1..22: mol_type = other RNA
agttttgccaggaaacgtagcc

SEQ ID NO: 891 - RNA, 22 nt, synthetic construct
  source 1..22: mol_type = other RNA
ataatgcacaccttccctgagt

SEQ ID NO: 892 - RNA, 22 nt, synthetic construct
  source 1..22: mol_type = other RNA
atacgtcgaagaagagggaaac

SEQ ID NO: 893 - RNA, 22 nt, synthetic construct
  source 1..22: mol_type = other RNA
atccactagatacgtcgaagaa

SEQ ID NO: 894 - RNA, 22 nt, synthetic construct
  source 1..22: mol_type = other RNA
atctagtggataatgcacacct

SEQ ID NO: 895 - RNA, 22 nt, synthetic construct
  source 1..22: mol_type = other RNA
atgcacaccttccctgagtcag

SEQ ID NO: 896 - RNA, 22 nt, synthetic construct
  source 1..22: mol_type = other RNA
atggagaaagtgcaacaagcag

SEQ ID NO: 897 - RNA, 22 nt, synthetic construct
  source 1..22: mol_type = other RNA
atggctttcggaagttttgcca

SEQ ID NO: 898 - RNA, 22 nt, synthetic construct
  source 1..22: mol_type = other RNA
attatccactagatacgtcgaa

SEQ ID NO: 899 - RNA, 22 nt, synthetic construct
  source 1..22: mol_type = other RNA
attcgttcctttgctttttgca

SEQ ID NO: 900 - RNA, 22 nt, synthetic construct
  source 1..22: mol_type = other RNA
attggtttccctcttcttcgac

SEQ ID NO: 901 - RNA, 22 nt, synthetic construct
  source 1..22: mol_type = other RNA
atttatttcgaccctaattggt

SEQ ID NO: 902 - RNA, 22 nt, synthetic construct
  source 1..22: mol_type = other RNA
atttcgaccctaattggtttcc

SEQ ID NO: 903 - RNA, 22 nt, synthetic construct
  source 1..22: mol_type = other RNA
atttctccaaaagaaggtctag

SEQ ID NO: 904 - RNA, 22 nt, synthetic construct
  source 1..22: mol_type = other RNA
caaaaagcaaaggaacgaatgg

SEQ ID NO: 905 - RNA, 22 nt, synthetic construct
  source 1..22: mol_type = other RNA
caaaacttccgaaagccatttc

SEQ ID NO: 906 - RNA, 22 nt, synthetic construct
  source 1..22: mol_type = other RNA
caaaagaaggtctagaagagga

SEQ ID NO: 907 - RNA, 22 nt, synthetic construct
  source 1..22: mol_type = other RNA
caaagctgcctgcctagggcta

SEQ ID NO: 908 - RNA, 22 nt, synthetic construct
  source 1..22: mol_type = other RNA
caaaggaacgaatggagaaagt

SEQ ID NO: 909 - RNA, 22 nt, synthetic construct
  source 1..22: mol_type = other RNA
caacaagcagaaagggggctgc

SEQ ID NO: 910 - RNA, 22 nt, synthetic construct
  source 1..22: mol_type = other RNA
caagcagaaagggggctgcaaa

SEQ ID NO: 911 - RNA, 22 nt, synthetic construct
  source 1..22: mol_type = other RNA
cacaccttccctgagtcagagc

SEQ ID NO: 912 - RNA, 22 nt, synthetic construct
  source 1..22: mol_type = other RNA
caccttccctgagtcagagcct

SEQ ID NO: 913 - RNA, 22 nt, synthetic construct
  source 1..22: mol_type = other RNA
cactagatacgtcgaagaagag

SEQ ID NO: 914 - RNA, 22 nt, synthetic construct
  source 1..22: mol_type = other RNA
cactttctccattcgttccttt

SEQ ID NO: 915 - RNA, 22 nt, synthetic construct
  source 1..22: mol_type = other RNA
cagaaagggggctgcaaagctg

SEQ ID NO: 916 - RNA, 22 nt, synthetic construct
  source 1..22: mol_type = other RNA
cagagcctgcaaaaagcaaagg

SEQ ID NO: 917 - RNA, 22 nt, synthetic construct
  source 1..22: mol_type = other RNA
cagccccctttctgcttgttgc

SEQ ID NO: 918 - RNA, 22 nt, synthetic construct
  source 1..22: mol_type = other RNA
cagctttgcagccccctttctg

SEQ ID NO: 919 - RNA, 22 nt, synthetic construct
  source 1..22: mol_type = other RNA
caggaaacgtagccctaggcag

SEQ ID NO: 920 - RNA, 22 nt, synthetic construct
  source 1..22: mol_type = other RNA
caggcagctttgcagccccctt

SEQ ID NO: 921 - RNA, 22 nt, synthetic construct
  source 1..22: mol_type = other RNA
caggctctgactcagggaaggt

SEQ ID NO: 922 - RNA, 22 nt, synthetic construct
  source 1..22: mol_type = other RNA
cagggaaggtgtgcattatcca

SEQ ID NO: 923 - RNA, 22 nt, synthetic construct
  source 1..22: mol_type = other RNA
cattatccactagatacgtcga

SEQ ID NO: 924 - RNA, 22 nt, synthetic construct
  source 1..22: mol_type = other RNA
cattcgttcctttgctttttgc

SEQ ID NO: 925 - RNA, 22 nt, synthetic construct
  source 1..22: mol_type = other RNA
catttatttcgaccctaattgg

SEQ ID NO: 926 - RNA, 22 nt, synthetic construct
  source 1..22: mol_type = other RNA
catttctccaaaagaaggtcta

SEQ ID NO: 927 - RNA, 22 nt, synthetic construct
  source 1..22: mol_type = other RNA
ccaaaagaaggtctagaagagg

SEQ ID NO: 928 - RNA, 22 nt, synthetic construct
  source 1..22: mol_type = other RNA
ccactagatacgtcgaagaaga

SEQ ID NO: 929 - RNA, 22 nt, synthetic construct
  source 1..22: mol_type = other RNA
ccaggaaacgtagccctaggca

SEQ ID NO: 930 - RNA, 22 nt, synthetic construct
  source 1..22: mol_type = other RNA
ccattcgttcctttgctttttg

SEQ ID NO: 931 - RNA, 22 nt, synthetic construct
  source 1..22: mol_type = other RNA
ccatttctccaaaagaaggtct

SEQ ID NO: 932 - RNA, 22 nt, synthetic construct
  source 1..22: mol_type = other RNA
ccccctttctgcttgttgcact

SEQ ID NO: 933 - RNA, 22 nt, synthetic construct
  source 1..22: mol_type = other RNA
cccctttctgcttgttgcactt

SEQ ID NO: 934 - RNA, 22 nt, synthetic construct
  source 1..22: mol_type = other RNA
ccctaattggtttccctcttct

SEQ ID NO: 935 - RNA, 22 nt, synthetic construct
  source 1..22: mol_type = other RNA
ccctaggcaggcagctttgcag

SEQ ID NO: 936 - RNA, 22 nt, synthetic construct
  source 1..22: mol_type = other RNA
ccctcttcttcgacgtatctag

SEQ ID NO: 937 - RNA, 22 nt, synthetic construct
  source 1..22: mol_type = other RNA
ccctgagtcagagcctgcaaaa

SEQ ID NO: 938 - RNA, 22 nt, synthetic construct
  source 1..22: mol_type = other RNA
ccctttctgcttgttgcacttt

SEQ ID NO: 939 - RNA, 22 nt, synthetic construct
  source 1..22: mol_type = other RNA
ccgaaagccatttctccaaaag

SEQ ID NO: 940 - RNA, 22 nt, synthetic construct
  source 1..22: mol_type = other RNA
cctaattggtttccctcttctt

SEQ ID NO: 941 - RNA, 22 nt, synthetic construct
  source 1..22: mol_type = other RNA
cctaggcaggcagctttgcagc

SEQ ID NO: 942 - RNA, 22 nt, synthetic construct
  source 1..22: mol_type = other RNA
cctagggctacgtttcctggca

SEQ ID NO: 943 - RNA, 22 nt, synthetic construct
  source 1..22: mol_type = other RNA
cctcctcctcctcctcttctag

SEQ ID NO: 944 - RNA, 22 nt, synthetic construct
  source 1..22: mol_type = other RNA
cctcctcctcctcttctagacc

SEQ ID NO: 945 - RNA, 22 nt, synthetic construct
  source 1..22: mol_type = other RNA
cctcctcctcttctagaccttc

SEQ ID NO: 946 - RNA, 22 nt, synthetic construct
  source 1..22: mol_type = other RNA
cctcctcttctagaccttcttt

SEQ ID NO: 947 - RNA, 22 nt, synthetic construct
  source 1..22: mol_type = other RNA
cctccttctcctcctcctcctc

SEQ ID NO: 948 - RNA, 22 nt, synthetic construct
  source 1..22: mol_type = other RNA
cctcttctagaccttcttttgg

SEQ ID NO: 949 - RNA, 22 nt, synthetic construct
  source 1..22: mol_type = other RNA
cctcttcttcgacgtatctagt

SEQ ID NO: 950 - RNA, 22 nt, synthetic construct
  source 1..22: mol_type = other RNA
cctgagtcagagcctgcaaaaa

SEQ ID NO: 951 - RNA, 22 nt, synthetic construct
  source 1..22: mol_type = other RNA
cctgcaaaaagcaaaggaacga

SEQ ID NO: 952 - RNA, 22 nt, synthetic construct
  source 1..22: mol_type = other RNA
cctgcctagggctacgtttcct

SEQ ID NO: 953 - RNA, 22 nt, synthetic construct
  source 1..22: mol_type = other RNA
cctggcaaaacttccgaaagcc

SEQ ID NO: 954 - RNA, 22 nt, synthetic construct
  source 1..22: mol_type = other RNA
ccttccctgagtcagagcctgc

SEQ ID NO: 955 - RNA, 22 nt, synthetic construct
  source 1..22: mol_type = other RNA
ccttctcctcctcctcctcctc

SEQ ID NO: 956 - RNA, 22 nt, synthetic construct
  source 1..22: mol_type = other RNA
ccttcttttggagaaatggctt

SEQ ID NO: 957 - RNA, 22 nt, synthetic construct
  source 1..22: mol_type = other RNA
cctttctgcttgttgcactttc

SEQ ID NO: 958 - RNA, 22 nt, synthetic construct
  source 1..22: mol_type = other RNA
cctttgctttttgcaggctctg

SEQ ID NO: 959 - RNA, 22 nt, synthetic construct
  source 1..22: mol_type = other RNA
cgaaagccatttctccaaaaga

SEQ ID NO: 960 - RNA, 22 nt, synthetic construct
  source 1..22: mol_type = other RNA
cgaagaagagggaaaccaatta

SEQ ID NO: 961 - RNA, 22 nt, synthetic construct
  source 1..22: mol_type = other RNA
cgaatggagaaagtgcaacaag

SEQ ID NO: 962 - RNA, 22 nt, synthetic construct
  source 1..22: mol_type = other RNA
cgaccctaattggtttccctct

SEQ ID NO: 963 - RNA, 22 nt, synthetic construct
  source 1..22: mol_type = other RNA
cgacgtatctagtggataatgc

SEQ ID NO: 964 - RNA, 22 nt, synthetic construct
  source 1..22: mol_type = other RNA
cggaagttttgccaggaaacgt

SEQ ID NO: 965 - RNA, 22 nt, synthetic construct
  source 1..22: mol_type = other RNA
cgtagccctaggcaggcagctt

SEQ ID NO: 966 - RNA, 22 nt, synthetic construct
  source 1..22: mol_type = other RNA
cgtatctagtggataatgcaca

SEQ ID NO: 967 - RNA, 22 nt, synthetic construct
  source 1..22: mol_type = other RNA
cgtcgaagaagagggaaaccaa

SEQ ID NO: 968 - RNA, 22 nt, synthetic construct
  source 1..22: mol_type = other RNA
cgttcctttgctttttgcaggc

SEQ ID NO: 969 - RNA, 22 nt, synthetic construct
  source 1..22: mol_type = other RNA
cgtttcctggcaaaacttccga

SEQ ID NO: 970 - RNA, 22 nt, synthetic construct
  source 1..22: mol_type = other RNA
ctaattggtttccctcttcttc

SEQ ID NO: 971 - RNA, 22 nt, synthetic construct
  source 1..22: mol_type = other RNA
ctacgtttcctggcaaaacttc

SEQ ID NO: 972 - RNA, 22 nt, synthetic construct
  source 1..22: mol_type = other RNA
ctagaagaggaggaggaggagg

SEQ ID NO: 973 - RNA, 22 nt, synthetic construct
  source 1..22: mol_type = other RNA
ctagaccttcttttggagaaat

SEQ ID NO: 974 - RNA, 22 nt, synthetic construct
  source 1..22: mol_type = other RNA
ctagatacgtcgaagaagaggg

SEQ ID NO: 975 - RNA, 22 nt, synthetic construct
  source 1..22: mol_type = other RNA
ctaggcaggcagctttgcagcc

SEQ ID NO: 976 - RNA, 22 nt, synthetic construct
  source 1..22: mol_type = other RNA
ctagggctacgtttcctggcaa

SEQ ID NO: 977 - RNA, 22 nt, synthetic construct
  source 1..22: mol_type = other RNA
ctagtggataatgcacaccttc

SEQ ID NO: 978 - RNA, 22 nt, synthetic construct
  source 1..22: mol_type = other RNA
ctcagggaaggtgtgcattatc

SEQ ID NO: 979 - RNA, 22 nt, synthetic construct
  source 1..22: mol_type = other RNA
ctccaaaagaaggtctagaaga

SEQ ID NO: 980 - RNA, 22 nt, synthetic construct
  source 1..22: mol_type = other RNA
ctccattcgttcctttgctttt

SEQ ID NO: 981 - RNA, 22 nt, synthetic construct
  source 1..22: mol_type = other RNA
ctcctcctcctcctcctcttct

SEQ ID NO: 982 - RNA, 22 nt, synthetic construct
  source 1..22: mol_type = other RNA
ctcctcctcctcctcttctaga

SEQ ID NO: 983 - RNA, 22 nt, synthetic construct
  source 1..22: mol_type = other RNA
ctcctcctcctcttctagacct

SEQ ID NO: 984 - RNA, 22 nt, synthetic construct
  source 1..22: mol_type = other RNA
ctcctcctcttctagaccttct

SEQ ID NO: 985 - RNA, 22 nt, synthetic construct
  source 1..22: mol_type = other RNA
ctcctcttctagaccttctttt

SEQ ID NO: 986 - RNA, 22 nt, synthetic construct
  source 1..22: mol_type = other RNA
ctccttctcctcctcctcctcc

SEQ ID NO: 987 - RNA, 22 nt, synthetic construct
  source 1..22: mol_type = other RNA
ctctgactcagggaaggtgtgc

SEQ ID NO: 988 - RNA, 22 nt, synthetic construct
  source 1..22: mol_type = other RNA
ctcttctagaccttcttttgga

SEQ ID NO: 989 - RNA, 22 nt, synthetic construct
  source 1..22: mol_type = other RNA
ctcttcttcgacgtatctagtg

SEQ ID NO: 990 - RNA, 22 nt, synthetic construct
  source 1..22: mol_type = other RNA
ctgactcagggaaggtgtgcat

SEQ ID NO: 991 - RNA, 22 nt, synthetic construct
  source 1..22: mol_type = other RNA
ctgagtcagagcctgcaaaaag

SEQ ID NO: 992 - RNA, 22 nt, synthetic construct
  source 1..22: mol_type = other RNA
ctgcaaaaagcaaaggaacgaa

SEQ ID NO: 993 - RNA, 22 nt, synthetic construct
  source 1..22: mol_type = other RNA
ctgcaaagctgcctgcctaggg

SEQ ID NO: 994 - RNA, 22 nt, synthetic construct
  source 1..22: mol_type = other RNA
ctgcctagggctacgtttcctg

SEQ ID NO: 995 - RNA, 22 nt, synthetic construct
  source 1..22: mol_type = other RNA
ctgcctgcctagggctacgttt

SEQ ID NO: 996 - RNA, 22 nt, synthetic construct
  source 1..22: mol_type = other RNA
ctgcttgttgcactttctccat

SEQ ID NO: 997 - RNA, 22 nt, synthetic construct
  source 1..22: mol_type = other RNA
ctggcaaaacttccgaaagcca

SEQ ID NO: 998 - RNA, 22 nt, synthetic construct
  source 1..22: mol_type = other RNA
cttccctgagtcagagcctgca

SEQ ID NO: 999 - RNA, 22 nt, synthetic construct
  source 1..22: mol_type = other RNA
cttccgaaagccatttctccaa

SEQ ID NO: 1000 - RNA, 22 nt, synthetic construct
  source 1..22: mol_type = other RNA
cttcgacgtatctagtggataa

SEQ ID NO: 1001 - RNA, 22 nt, synthetic construct
  source 1..22: mol_type = other RNA
cttctagaccttcttttggaga

SEQ ID NO: 1002 - RNA, 22 nt, synthetic construct
  source 1..22: mol_type = other RNA
cttctcctcctcctcctcctct

SEQ ID NO: 1003 - RNA, 22 nt, synthetic construct
  source 1..22: mol_type = other RNA
cttcttcgacgtatctagtgga

SEQ ID NO: 1004 - RNA, 22 nt, synthetic construct
  source 1..22: mol_type = other RNA
cttcttttggagaaatggcttt

SEQ ID NO: 1005 - RNA, 22 nt, synthetic construct
  source 1..22: mol_type = other RNA
cttgttgcactttctccattcg

SEQ ID NO: 1006 - RNA, 22 nt, synthetic construct
  source 1..22: mol_type = other RNA
ctttcggaagttttgccaggaa

SEQ ID NO: 1007 - RNA, 22 nt, synthetic construct
  source 1..22: mol_type = other RNA
ctttctccattcgttcctttgc

SEQ ID NO: 1008 - RNA, 22 nt, synthetic construct
  source 1..22: mol_type = other RNA
ctttctgcttgttgcactttct

SEQ ID NO: 1009 - RNA, 22 nt, synthetic construct
  source 1..22: mol_type = other RNA
ctttgcagccccctttctgctt

SEQ ID NO: 1010 - RNA, 22 nt, synthetic construct
  source 1..22: mol_type = other RNA
ctttgctttttgcaggctctga

SEQ ID NO: 1011 - RNA, 22 nt, synthetic construct
  source 1..22: mol_type = other RNA
cttttggagaaatggctttcgg

SEQ ID NO: 1012 - RNA, 22 nt, synthetic construct
  source 1..22: mol_type = other RNA
ctttttgcaggctctgactcag

SEQ ID NO: 1013 - RNA, 22 nt, synthetic construct
  source 1..22: mol_type = other RNA
gaaacgtagccctaggcaggca

SEQ ID NO: 1014 - RNA, 22 nt, synthetic construct
  source 1..22: mol_type = other RNA
gaaagccatttctccaaaagaa

SEQ ID NO: 1015 - RNA, 22 nt, synthetic construct
  source 1..22: mol_type = other RNA
gaaagggggctgcaaagctgcc

SEQ ID NO: 1016 - RNA, 22 nt, synthetic construct
  source 1..22: mol_type = other RNA
gaaagtgcaacaagcagaaagg

SEQ ID NO: 1017 - RNA, 22 nt, synthetic construct
  source 1..22: mol_type = other RNA
gaaatggctttcggaagttttg

SEQ ID NO: 1018 - RNA, 22 nt, synthetic construct
  source 1..22: mol_type = other RNA
gaacgaatggagaaagtgcaac

SEQ ID NO: 1019 - RNA, 22 nt, synthetic construct
  source 1..22: mol_type = other RNA
gaagaagagggaaaccaattag

SEQ ID NO: 1020 - RNA, 22 nt, synthetic construct
  source 1..22: mol_type = other RNA
gaagagggaaaccaattagggt

SEQ ID NO: 1021 - RNA, 22 nt, synthetic construct
  source 1..22: mol_type = other RNA
gaaggtctagaagaggaggagg

SEQ ID NO: 1022 - RNA, 22 nt, synthetic construct
  source 1..22: mol_type = other RNA
gaaggtgtgcattatccactag

SEQ ID NO: 1023 - RNA, 22 nt, synthetic construct
  source 1..22: mol_type = other RNA
gaagttttgccaggaaacgtag

SEQ ID NO: 1024 - RNA, 22 nt, synthetic construct
  source 1..22: mol_type = other RNA
gaatggagaaagtgcaacaagc

SEQ ID NO: 1025 - RNA, 22 nt, synthetic construct
  source 1..22: mol_type = other RNA
gaccctaattggtttccctctt

SEQ ID NO: 1026 - RNA, 22 nt, synthetic construct
  source 1..22: mol_type = other RNA
gaccttcttttggagaaatggc

SEQ ID NO: 1027 - RNA, 22 nt, synthetic construct
  source 1..22: mol_type = other RNA
gacgtatctagtggataatgca

SEQ ID NO: 1028 - RNA, 22 nt, synthetic construct
  source 1..22: mol_type = other RNA
gactcagggaaggtgtgcatta

SEQ ID NO: 1029 - RNA, 22 nt, synthetic construct
  source 1..22: mol_type = other RNA
gagaaagtgcaacaagcagaaa

SEQ ID NO: 1030 - RNA, 22 nt, synthetic construct
  source 1..22: mol_type = other RNA
gagaaatggctttcggaagttt

SEQ ID NO: 1031 - RNA, 22 nt, synthetic construct
  source 1..22: mol_type = other RNA
gagcctgcaaaaagcaaaggaa

SEQ ID NO: 1032 - RNA, 22 nt, synthetic construct
  source 1..22: mol_type = other RNA
gagggaaaccaattagggtcga

SEQ ID NO: 1033 - RNA, 22 nt, synthetic construct
  source 1..22: mol_type = other RNA
gagtcagagcctgcaaaaagca

SEQ ID NO: 1034 - RNA, 22 nt, synthetic construct
  source 1..22: mol_type = other RNA
gataatgcacaccttccctgag

SEQ ID NO: 1035 - RNA, 22 nt, synthetic construct
  source 1..22: mol_type = other RNA
gatacgtcgaagaagagggaaa

SEQ ID NO: 1036 - RNA, 22 nt, synthetic construct
  source 1..22: mol_type = other RNA
gcaaaaagcaaaggaacgaatg

SEQ ID NO: 1037 - RNA, 22 nt, synthetic construct
  source 1..22: mol_type = other RNA
gcaaaacttccgaaagccattt

SEQ ID NO: 1038 - RNA, 22 nt, synthetic construct
  source 1..22: mol_type = other RNA
gcaaagctgcctgcctagggct

SEQ ID NO: 1039 - RNA, 22 nt, synthetic construct
  source 1..22: mol_type = other RNA
gcaaaggaacgaatggagaaag

SEQ ID NO: 1040 - RNA, 22 nt, synthetic construct
  source 1..22: mol_type = other RNA
gcaacaagcagaaagggggctg

SEQ ID NO: 1041 - RNA, 22 nt, synthetic construct
  source 1..22: mol_type = other RNA
gcacaccttccctgagtcagag

SEQ ID NO: 1042 - RNA, 22 nt, synthetic construct
  source 1..22: mol_type = other RNA
gcactttctccattcgttcctt

SEQ ID NO: 1043 - RNA, 22 nt, synthetic construct
  source 1..22: mol_type = other RNA
gcagaaagggggctgcaaagct

SEQ ID NO: 1044 - RNA, 22 nt, synthetic construct
  source 1..22: mol_type = other RNA
gcagccccctttctgcttgttg

SEQ ID NO: 1045 - RNA, 22 nt, synthetic construct
  source 1..22: mol_type = other RNA
gcagctttgcagccccctttct

SEQ ID NO: 1046 - RNA, 22 nt, synthetic construct
  source 1..22: mol_type = other RNA
gcaggcagctttgcagccccct

SEQ ID NO: 1047 - RNA, 22 nt, synthetic construct
  source 1..22: mol_type = other RNA
gcaggctctgactcagggaagg

SEQ ID NO: 1048 - RNA, 22 nt, synthetic construct
  source 1..22: mol_type = other RNA
gcattatccactagatacgtcg

SEQ ID NO: 1049 - RNA, 22 nt, synthetic construct
  source 1..22: mol_type = other RNA
gcatttatttcgaccctaattg

SEQ ID NO: 1050 - RNA, 22 nt, synthetic construct
  source 1..22: mol_type = other RNA
gccaggaaacgtagccctaggc

SEQ ID NO: 1051 - RNA, 22 nt, synthetic construct
  source 1..22: mol_type = other RNA
gccatttctccaaaagaaggtc

SEQ ID NO: 1052 - RNA, 22 nt, synthetic construct
  source 1..22: mol_type = other RNA
gccccctttctgcttgttgcac

SEQ ID NO: 1053 - RNA, 22 nt, synthetic construct
  source 1..22: mol_type = other RNA
gccctaggcaggcagctttgca

SEQ ID NO: 1054 - RNA, 22 nt, synthetic construct
  source 1..22: mol_type = other RNA
gcctagggctacgtttcctggc

SEQ ID NO: 1055 - RNA, 22 nt, synthetic construct
  source 1..22: mol_type = other RNA
gcctgcaaaaagcaaaggaacg

SEQ ID NO: 1056 - RNA, 22 nt, synthetic construct
  source 1..22: mol_type = other RNA
gcctgcctagggctacgtttcc

SEQ ID NO: 1057 - RNA, 22 nt, synthetic construct
  source 1..22: mol_type = other RNA
gctacgtttcctggcaaaactt

SEQ ID NO: 1058 - RNA, 22 nt, synthetic construct
  source 1..22: mol_type = other RNA
gctctgactcagggaaggtgtg

SEQ ID NO: 1059 - RNA, 22 nt, synthetic construct
  source 1..22: mol_type = other RNA
gctgcaaagctgcctgcctagg

SEQ ID NO: 1060 - RNA, 22 nt, synthetic construct
  source 1..22: mol_type = other RNA
gctgcctgcctagggctacgtt

SEQ ID NO: 1061 - RNA, 22 nt, synthetic construct
  source 1..22: mol_type = other RNA
gcttgttgcactttctccattc

SEQ ID NO: 1062 - RNA, 22 nt, synthetic construct
  source 1..22: mol_type = other RNA
gctttcggaagttttgccagga

SEQ ID NO: 1063 - RNA, 22 nt, synthetic construct
  source 1..22: mol_type = other RNA
gctttgcagccccctttctgct

SEQ ID NO: 1064 - RNA, 22 nt, synthetic construct
  source 1..22: mol_type = other RNA
gctttttgcaggctctgactca

SEQ ID NO: 1065 - RNA, 22 nt, synthetic construct
  source 1..22: mol_type = other RNA
ggaaacgtagccctaggcaggc

SEQ ID NO: 1066 - RNA, 22 nt, synthetic construct
  source 1..22: mol_type = other RNA
ggaacgaatggagaaagtgcaa

SEQ ID NO: 1067 - RNA, 22 nt, synthetic construct
  source 1..22: mol_type = other RNA
ggaaggtgtgcattatccacta

SEQ ID NO: 1068 - RNA, 22 nt, synthetic construct
  source 1..22: mol_type = other RNA
ggaagttttgccaggaaacgta

SEQ ID NO: 1069 - RNA, 22 nt, synthetic construct
  source 1..22: mol_type = other RNA
ggagaaagtgcaacaagcagaa

SEQ ID NO: 1070 - RNA, 22 nt, synthetic construct
  source 1..22: mol_type = other RNA
ggagaaatggctttcggaagtt

SEQ ID NO: 1071 - RNA, 22 nt, synthetic construct
  source 1..22: mol_type = other RNA
ggataatgcacaccttccctga

SEQ ID NO: 1072 - RNA, 22 nt, synthetic construct
  source 1..22: mol_type = other RNA
ggcaaaacttccgaaagccatt

SEQ ID NO: 1073 - RNA, 22 nt, synthetic construct
  source 1..22: mol_type = other RNA
ggcagctttgcagccccctttc

SEQ ID NO: 1074 - RNA, 22 nt, synthetic construct
  source 1..22: mol_type = other RNA
ggcaggcagctttgcagccccc

SEQ ID NO: 1075 - RNA, 22 nt, synthetic construct
  source 1..22: mol_type = other RNA
ggctacgtttcctggcaaaact

SEQ ID NO: 1076 - RNA, 22 nt, synthetic construct
  source 1..22: mol_type = other RNA
ggctctgactcagggaaggtgt

SEQ ID NO: 1077 - RNA, 22 nt, synthetic construct
  source 1..22: mol_type = other RNA
ggctgcaaagctgcctgcctag

SEQ ID NO: 1078 - RNA, 22 nt, synthetic construct
  source 1..22: mol_type = other RNA
ggctttcggaagttttgccagg

SEQ ID NO: 1079 - RNA, 22 nt, synthetic construct
  source 1..22: mol_type = other RNA
gggaaggtgtgcattatccact

SEQ ID NO: 1080 - RNA, 22 nt, synthetic construct
  source 1..22: mol_type = other RNA
gggctacgtttcctggcaaaac

SEQ ID NO: 1081 - RNA, 22 nt, synthetic construct
  source 1..22: mol_type = other RNA
gggctgcaaagctgcctgccta

SEQ ID NO: 1082 - RNA, 22 nt, synthetic construct
  source 1..22: mol_type = other RNA
ggggctgcaaagctgcctgcct

SEQ ID NO: 1083 - RNA, 22 nt, synthetic construct
  source 1..22: mol_type = other RNA
gggggctgcaaagctgcctgcc

SEQ ID NO: 1084 - RNA, 22 nt, synthetic construct
  source 1..22: mol_type = other RNA
ggtctagaagaggaggaggagg

SEQ ID NO: 1085 - RNA, 22 nt, synthetic construct
  source 1..22: mol_type = other RNA
ggtgtgcattatccactagata

SEQ ID NO: 1086 - RNA, 22 nt, synthetic construct
  source 1..22: mol_type = other RNA
ggtttccctcttcttcgacgta

SEQ ID NO: 1087 - RNA, 22 nt, synthetic construct
  source 1..22: mol_type = other RNA
gtagccctaggcaggcagcttt

SEQ ID NO: 1088 - RNA, 22 nt, synthetic construct
  source 1..22: mol_type = other RNA
gtatctagtggataatgcacac

SEQ ID NO: 1089 - RNA, 22 nt, synthetic construct
  source 1..22: mol_type = other RNA
gtcagagcctgcaaaaagcaaa

SEQ ID NO: 1090 - RNA, 22 nt, synthetic construct
  source 1..22: mol_type = other RNA
gtcgaagaagagggaaaccaat

SEQ ID NO: 1091 - RNA, 22 nt, synthetic construct
  source 1..22: mol_type = other RNA
gtctagaagaggaggaggagga

SEQ ID NO: 1092 - RNA, 22 nt, synthetic construct
  source 1..22: mol_type = other RNA
gtgcaacaagcagaaagggggc

SEQ ID NO: 1093 - RNA, 22 nt, synthetic construct
  source 1..22: mol_type = other RNA
gtgcattatccactagatacgt

SEQ ID NO: 1094 - RNA, 22 nt, synthetic construct
  source 1..22: mol_type = other RNA
gtggataatgcacaccttccct

SEQ ID NO: 1095 - RNA, 22 nt, synthetic construct
  source 1..22: mol_type = other RNA
gtgtgcattatccactagatac

SEQ ID NO: 1096 - RNA, 22 nt, synthetic construct
  source 1..22: mol_type = other RNA
gttcctttgctttttgcaggct

SEQ ID NO: 1097 - RNA, 22 nt, synthetic construct
  source 1..22: mol_type = other RNA
gttgcactttctccattcgttc

SEQ ID NO: 1098 - RNA, 22 nt, synthetic construct
  source 1..22: mol_type = other RNA
gtttccctcttcttcgacgtat

SEQ ID NO: 1099 - RNA, 22 nt, synthetic construct
  source 1..22: mol_type = other RNA
gtttcctggcaaaacttccgaa

SEQ ID NO: 1100 - RNA, 22 nt, synthetic construct
  source 1..22: mol_type = other RNA
gttttgccaggaaacgtagccc

SEQ ID NO: 1101 - RNA, 22 nt, synthetic construct
  source 1..22: mol_type = other RNA
taatgcacaccttccctgagtc

SEQ ID NO: 1102 - RNA, 22 nt, synthetic construct
  source 1..22: mol_type = other RNA
taattggtttccctcttcttcg

SEQ ID NO: 1103 - RNA, 22 nt, synthetic construct
  source 1..22: mol_type = other RNA
tacgtcgaagaagagggaaacc

SEQ ID NO: 1104 - RNA, 22 nt, synthetic construct
  source 1..22: mol_type = other RNA
tacgtttcctggcaaaacttcc

SEQ ID NO: 1105 - RNA, 22 nt, synthetic construct
  source 1..22: mol_type = other RNA
tagaagaggaggaggaggagga

SEQ ID NO: 1106 - RNA, 22 nt, synthetic construct
  source 1..22: mol_type = other RNA
tagaccttcttttggagaaatg

SEQ ID NO: 1107 - RNA, 22 nt, synthetic construct
  source 1..22: mol_type = other RNA
tagatacgtcgaagaagaggga

SEQ ID NO: 1108 - RNA, 22 nt, synthetic construct
  source 1..22: mol_type = other RNA
tagccctaggcaggcagctttg

SEQ ID NO: 1109 - RNA, 22 nt, synthetic construct
  source 1..22: mol_type = other RNA
taggcaggcagctttgcagccc

SEQ ID NO: 1110 - RNA, 22 nt, synthetic construct
  source 1..22: mol_type = other RNA
tagggctacgtttcctggcaaa

SEQ ID NO: 1111 - RNA, 22 nt, synthetic construct
  source 1..22: mol_type = other RNA
tagtggataatgcacaccttcc

SEQ ID NO: 1112 - RNA, 22 nt, synthetic construct
  source 1..22: mol_type = other RNA
tatccactagatacgtcgaaga

SEQ ID NO: 1113 - RNA, 22 nt, synthetic construct
  source 1..22: mol_type = other RNA
tatctagtggataatgcacacc

SEQ ID NO: 1114 - RNA, 22 nt, synthetic construct
  source 1..22: mol_type = other RNA
tatttcgaccctaattggtttc

SEQ ID NO: 1115 - RNA, 22 nt, synthetic construct
  source 1..22: mol_type = other RNA
tcagagcctgcaaaaagcaaag

SEQ ID NO: 1116 - RNA, 22 nt, synthetic construct
  source 1..22: mol_type = other RNA
tcagggaaggtgtgcattatcc

SEQ ID NO: 1117 - RNA, 22 nt, synthetic construct
  source 1..22: mol_type = other RNA
tccaaaagaaggtctagaagag

SEQ ID NO: 1118 - RNA, 22 nt, synthetic construct
  source 1..22: mol_type = other RNA
tccactagatacgtcgaagaag

SEQ ID NO: 1119 - RNA, 22 nt, synthetic construct
  source 1..22: mol_type = other RNA
tccattcgttcctttgcttttt

SEQ ID NO: 1120 - RNA, 22 nt, synthetic construct
  source 1..22: mol_type = other RNA
tccctcttcttcgacgtatcta

SEQ ID NO: 1121 - RNA, 22 nt, synthetic construct
  source 1..22: mol_type = other RNA
tccctgagtcagagcctgcaaa

SEQ ID NO: 1122 - RNA, 22 nt, synthetic construct
  source 1..22: mol_type = other RNA
tccgaaagccatttctccaaaa

SEQ ID NO: 1123 - RNA, 22 nt, synthetic construct
  source 1..22: mol_type = other RNA
tcctcctcctcctcctcttcta

SEQ ID NO: 1124 - RNA, 22 nt, synthetic construct
  source 1..22: mol_type = other RNA
tcctcctcctcctcttctagac

SEQ ID NO: 1125 - RNA, 22 nt, synthetic construct
  source 1..22: mol_type = other RNA
tcctcctcctcttctagacctt

SEQ ID NO: 1126 - RNA, 22 nt, synthetic construct
  source 1..22: mol_type = other RNA
tcctcctcttctagaccttctt

SEQ ID NO: 1127 - RNA, 22 nt, synthetic construct
  source 1..22: mol_type = other RNA
tcctcttctagaccttcttttg

SEQ ID NO: 1128 - RNA, 22 nt, synthetic construct
  source 1..22: mol_type = other RNA
tcctggcaaaacttccgaaagc

SEQ ID NO: 1129 - RNA, 22 nt, synthetic construct
  source 1..22: mol_type = other RNA
tccttctcctcctcctcctcct

SEQ ID NO: 1130 - RNA, 22 nt, synthetic construct
  source 1..22: mol_type = other RNA
tcctttgctttttgcaggctct

SEQ ID NO: 1131 - RNA, 22 nt, synthetic construct
  source 1..22: mol_type = other RNA
tcgaagaagagggaaaccaatt

SEQ ID NO: 1132 - RNA, 22 nt, synthetic construct
  source 1..22: mol_type = other RNA
tcgaccctaattggtttccctc

SEQ ID NO: 1133 - RNA, 22 nt, synthetic construct
  source 1..22: mol_type = other RNA
tcgacgtatctagtggataatg

SEQ ID NO: 1134 - RNA, 22 nt, synthetic construct
  source 1..22: mol_type = other RNA
tcggaagttttgccaggaaacg

SEQ ID NO: 1135 - RNA, 22 nt, synthetic construct
  source 1..22: mol_type = other RNA
tcgttcctttgctttttgcagg

SEQ ID NO: 1136 - RNA, 22 nt, synthetic construct
  source 1..22: mol_type = other RNA
tctagaagaggaggaggaggag

SEQ ID NO: 1137 - RNA, 22 nt, synthetic construct
  source 1..22: mol_type = other RNA
tctagaccttcttttggagaaa

SEQ ID NO: 1138 - RNA, 22 nt, synthetic construct
  source 1..22: mol_type = other RNA
tctagtggataatgcacacctt

SEQ ID NO: 1139 - RNA, 22 nt, synthetic construct
  source 1..22: mol_type = other RNA
tctccaaaagaaggtctagaag

SEQ ID NO: 1140 - RNA, 22 nt, synthetic construct
  source 1..22: mol_type = other RNA
tctccattcgttcctttgcttt

SEQ ID NO: 1141 - RNA, 22 nt, synthetic construct
  source 1..22: mol_type = other RNA
tctcctcctcctcctcctcttc

SEQ ID NO: 1142 - RNA, 22 nt, synthetic construct
  source 1..22: mol_type = other RNA
tctgactcagggaaggtgtgca

SEQ ID NO: 1143 - RNA, 22 nt, synthetic construct
  source 1..22: mol_type = other RNA
tctgcttgttgcactttctcca

SEQ ID NO: 1144 - RNA, 22 nt, synthetic construct
  source 1..22: mol_type = other RNA
tcttcgacgtatctagtggata

SEQ ID NO: 1145 - RNA, 22 nt, synthetic construct
  source 1..22: mol_type = other RNA
tcttctagaccttcttttggag

SEQ ID NO: 1146 - RNA, 22 nt, synthetic construct
  source 1..22: mol_type = other RNA
tcttcttcgacgtatctagtgg

SEQ ID NO: 1147 - RNA, 22 nt, synthetic construct
  source 1..22: mol_type = other RNA
tcttttggagaaatggctttcg

SEQ ID NO: 1148 - RNA, 22 nt, synthetic construct
  source 1..22: mol_type = other RNA
tgactcagggaaggtgtgcatt

SEQ ID NO: 1149 - RNA, 22 nt, synthetic construct
  source 1..22: mol_type = other RNA
tgagtcagagcctgcaaaaagc

SEQ ID NO: 1150 - RNA, 22 nt, synthetic construct
  source 1..22: mol_type = other RNA
tgcaaaaagcaaaggaacgaat

SEQ ID NO: 1151 - RNA, 22 nt, synthetic construct
  source 1..22: mol_type = other RNA
tgcaaagctgcctgcctagggc

SEQ ID NO: 1152 - RNA, 22 nt, synthetic construct
  source 1..22: mol_type = other RNA
tgcaacaagcagaaagggggct

SEQ ID NO: 1153 - RNA, 22 nt, synthetic construct
  source 1..22: mol_type = other RNA
tgcacaccttccctgagtcaga

SEQ ID NO: 1154 - RNA, 22 nt, synthetic construct
  source 1..22: mol_type = other RNA
tgcactttctccattcgttcct

SEQ ID NO: 1155 - RNA, 22 nt, synthetic construct
  source 1..22: mol_type = other RNA
tgcagccccctttctgcttgtt

SEQ ID NO: 1156 - RNA, 22 nt, synthetic construct
  source 1..22: mol_type = other RNA
tgcaggctctgactcagggaag

SEQ ID NO: 1157 - RNA, 22 nt, synthetic construct
  source 1..22: mol_type = other RNA
tgcattatccactagatacgtc

SEQ ID NO: 1158 - RNA, 22 nt, synthetic construct
  source 1..22: mol_type = other RNA
tgccaggaaacgtagccctagg

SEQ ID NO: 1159 - RNA, 22 nt, synthetic construct
  source 1..22: mol_type = other RNA
tgcctagggctacgtttcctgg

SEQ ID NO: 1160 - RNA, 22 nt, synthetic construct
  source 1..22: mol_type = other RNA
tgcctgcctagggctacgtttc

SEQ ID NO: 1161 - RNA, 22 nt, synthetic construct
  source 1..22: mol_type = other RNA
tgcttgttgcactttctccatt

SEQ ID NO: 1162 - RNA, 22 nt, synthetic construct
  source 1..22: mol_type = other RNA
tgctttttgcaggctctgactc

SEQ ID NO: 1163 - RNA, 22 nt, synthetic construct
  source 1..22: mol_type = other RNA
tggagaaagtgcaacaagcaga

SEQ ID NO: 1164 - RNA, 22 nt, synthetic construct
  source 1..22: mol_type = other RNA
tggagaaatggctttcggaagt

SEQ ID NO: 1165 - RNA, 22 nt, synthetic construct
  source 1..22: mol_type = other RNA
tggataatgcacaccttccctg

SEQ ID NO: 1166 - RNA, 22 nt, synthetic construct
  source 1..22: mol_type = other RNA
tggcaaaacttccgaaagccat

SEQ ID NO: 1167 - RNA, 22 nt, synthetic construct
  source 1..22: mol_type = other RNA
tggctttcggaagttttgccag

SEQ ID NO: 1168 - RNA, 22 nt, synthetic construct
  source 1..22: mol_type = other RNA
tggtttccctcttcttcgacgt

SEQ ID NO: 1169 - RNA, 22 nt, synthetic construct
  source 1..22: mol_type = other RNA
tgtgcattatccactagatacg

SEQ ID NO: 1170 - RNA, 22 nt, synthetic construct
  source 1..22: mol_type = other RNA
tgttgcactttctccattcgtt

SEQ ID NO: 1171 - RNA, 22 nt, synthetic construct
  source 1..22: mol_type = other RNA
ttatccactagatacgtcgaag

SEQ ID NO: 1172 - RNA, 22 nt, synthetic construct
  source 1..22: mol_type = other RNA
ttatttcgaccctaattggttt

SEQ ID NO: 1173 - RNA, 22 nt, synthetic construct
  source 1..22: mol_type = other RNA
ttccctcttcttcgacgtatct

SEQ ID NO: 1174 - RNA, 22 nt, synthetic construct
  source 1..22: mol_type = other RNA
ttccctgagtcagagcctgcaa

SEQ ID NO: 1175 - RNA, 22 nt, synthetic construct
  source 1..22: mol_type = other RNA
ttccgaaagccatttctccaaa

SEQ ID NO: 1176 - RNA, 22 nt, synthetic construct
  source 1..22: mol_type = other RNA
ttcctggcaaaacttccgaaag

SEQ ID NO: 1177 - RNA, 22 nt, synthetic construct
  source 1..22: mol_type = other RNA
ttcctttgctttttgcaggctc

SEQ ID NO: 1178 - RNA, 22 nt, synthetic construct
  source 1..22: mol_type = other RNA
ttcgaccctaattggtttccct

SEQ ID NO: 1179 - RNA, 22 nt, synthetic construct
  source 1..22: mol_type = other RNA
ttcgacgtatctagtggataat

SEQ ID NO: 1180 - RNA, 22 nt, synthetic construct
  source 1..22: mol_type = other RNA
ttcggaagttttgccaggaaac

SEQ ID NO: 1181 - RNA, 22 nt, synthetic construct
  source 1..22: mol_type = other RNA
ttcgttcctttgctttttgcag

SEQ ID NO: 1182 - RNA, 22 nt, synthetic construct
  source 1..22: mol_type = other RNA
ttctagaccttcttttggagaa

SEQ ID NO: 1183 - RNA, 22 nt, synthetic construct
  source 1..22: mol_type = other RNA
ttctccaaaagaaggtctagaa

SEQ ID NO: 1184 - RNA, 22 nt, synthetic construct
  source 1..22: mol_type = other RNA
ttctccattcgttcctttgctt

SEQ ID NO: 1185 - RNA, 22 nt, synthetic construct
  source 1..22: mol_type = other RNA
ttctcctcctcctcctcctctt

SEQ ID NO: 1186 - RNA, 22 nt, synthetic construct
  source 1..22: mol_type = other RNA
ttctgcttgttgcactttctcc

SEQ ID NO: 1187 - RNA, 22 nt, synthetic construct
  source 1..22: mol_type = other RNA
ttcttcgacgtatctagtggat

SEQ ID NO: 1188 - RNA, 22 nt, synthetic construct
  source 1..22: mol_type = other RNA
ttcttttggagaaatggctttc

SEQ ID NO: 1189 - RNA, 22 nt, synthetic construct
  source 1..22: mol_type = other RNA
ttgcactttctccattcgttcc

SEQ ID NO: 1190 - RNA, 22 nt, synthetic construct
  source 1..22: mol_type = other RNA
ttgcagccccctttctgcttgt

SEQ ID NO: 1191 - RNA, 22 nt, synthetic construct
  source 1..22: mol_type = other RNA
ttgcaggctctgactcagggaa

SEQ ID NO: 1192 - RNA, 22 nt, synthetic construct
  source 1..22: mol_type = other RNA
ttgccaggaaacgtagccctag

SEQ ID NO: 1193 - RNA, 22 nt, synthetic construct
  source 1..22: mol_type = other RNA
ttgctttttgcaggctctgact

SEQ ID NO: 1194 - RNA, 22 nt, synthetic construct
  source 1..22: mol_type = other RNA
ttggagaaatggctttcggaag

SEQ ID NO: 1195 - RNA, 22 nt, synthetic construct
  source 1..22: mol_type = other RNA
ttggtttccctcttcttcgacg

SEQ ID NO: 1196 - RNA, 22 nt, synthetic construct
  source 1..22: mol_type = other RNA
ttgttgcactttctccattcgt

SEQ ID NO: 1197 - RNA, 22 nt, synthetic construct
  source 1..22: mol_type = other RNA
tttatttcgaccctaattggtt

SEQ ID NO: 1198 - RNA, 22 nt, synthetic construct
  source 1..22: mol_type = other RNA
tttccctcttcttcgacgtatc

SEQ ID NO: 1199 - RNA, 22 nt, synthetic construct
  source 1..22: mol_type = other RNA
tttcctggcaaaacttccgaaa

SEQ ID NO: 1200 - RNA, 22 nt, synthetic construct
  source 1..22: mol_type = other RNA
tttcgaccctaattggtttccc

SEQ ID NO: 1201 - RNA, 22 nt, synthetic construct
  source 1..22: mol_type = other RNA
tttcggaagttttgccaggaaa

SEQ ID NO: 1202 - RNA, 22 nt, synthetic construct
  source 1..22: mol_type = other RNA
tttctccaaaagaaggtctaga

SEQ ID NO: 1203 - RNA, 22 nt, synthetic construct
  source 1..22: mol_type = other RNA
tttctccattcgttcctttgct

SEQ ID NO: 1204 - RNA, 22 nt, synthetic construct
  source 1..22: mol_type = other RNA
tttctgcttgttgcactttctc

SEQ ID NO: 1205 - RNA, 22 nt, synthetic construct
  source 1..22: mol_type = other RNA
tttgcagccccctttctgcttg

SEQ ID NO: 1206 - RNA, 22 nt, synthetic construct
  source 1..22: mol_type = other RNA
tttgcaggctctgactcaggga

SEQ ID NO: 1207 - RNA, 22 nt, synthetic construct
  source 1..22: mol_type = other RNA
tttgccaggaaacgtagcccta

SEQ ID NO: 1208 - RNA, 22 nt, synthetic construct
  source 1..22: mol_type = other RNA
tttgctttttgcaggctctgac

SEQ ID NO: 1209 - RNA, 22 nt, synthetic construct
  source 1..22: mol_type = other RNA
tttggagaaatggctttcggaa

SEQ ID NO: 1210 - RNA, 22 nt, synthetic construct
  source 1..22: mol_type = other RNA
ttttgcaggctctgactcaggg

SEQ ID NO: 1211 - RNA, 22 nt, synthetic construct
  source 1..22: mol_type = other RNA
ttttgccaggaaacgtagccct

SEQ ID NO: 1212 - RNA, 22 nt, synthetic construct
  source 1..22: mol_type = other RNA
ttttggagaaatggctttcgga

SEQ ID NO: 1213 - RNA, 22 nt, synthetic construct
  source 1..22: mol_type = other RNA
tttttgcaggctctgactcagg

SEQ ID NO: 1214 - RNA, 22 nt, synthetic construct
  source 1..22: mol_type = other RNA
ttatcaagattcaggttggagg

SEQ ID NO: 1215 - RNA, 22 nt, synthetic construct
  source 1..22: mol_type = other RNA
tcaagattcaggttggaggcca

SEQ ID NO: 1216 - RNA, 20 nt, synthetic construct
  source 1..20: mol_type = other RNA
taactaggaggtaagatgta

SEQ ID NO: 1217 - RNA, 20 nt, synthetic construct
  source 1..20: mol_type = other RNA
aaaaagaatccacaaaacac

SEQ ID NO: 1218 - RNA, 20 nt, synthetic construct
  source 1..20: mol_type = other RNA
aaaactccacaagtgtgtca

SEQ ID NO: 1219 - RNA, 20 nt, synthetic construct
  source 1..20: mol_type = other RNA
aaaagaatccacaaaacaca

SEQ ID NO: 1220 - RNA, 20 nt, synthetic construct
  source 1..20: mol_type = other RNA
aaaaggaagcaaagggatgg

SEQ ID NO: 1221 - RNA, 20 nt, synthetic construct
  source 1..20: mol_type = other RNA
aaaatccaaaccgccttcca

SEQ ID NO: 1222 - RNA, 20 nt, synthetic construct
  source 1..20: mol_type = other RNA
aaaatgaattcattctcctg

SEQ ID NO: 1223 - RNA, 20 nt, synthetic construct
  source 1..20: mol_type = other RNA
aaaccaagtcccagacatgt

SEQ ID NO: 1224 - RNA, 20 nt, synthetic construct
  source 1..20: mol_type = other RNA
aaaccgccttccaagtgggg

SEQ ID NO: 1225 - RNA, 20 nt, synthetic construct
  source 1..20: mol_type = other RNA
aaactcatctggcattaaaa

SEQ ID NO: 1226 - RNA, 20 nt, synthetic construct
  source 1..20: mol_type = other RNA
aaactccacaagtgtgtcaa

SEQ ID NO: 1227 - RNA, 20 nt, synthetic construct
  source 1..20: mol_type = other RNA
aaagaatccacaaaacacac

SEQ ID NO: 1228 - RNA, 20 nt, synthetic construct
  source 1..20: mol_type = other RNA
aaagagccccacttggaagg

SEQ ID NO: 1229 - RNA, 20 nt, synthetic construct
  source 1..20: mol_type = other RNA
aaagcggaacttgacacact

SEQ ID NO: 1230 - RNA, 20 nt, synthetic construct
  source 1..20: mol_type = other RNA
aaaggaagcaaagggatgga

SEQ ID NO: 1231 - RNA, 20 nt, synthetic construct
  source 1..20: mol_type = other RNA
aaagggatggagaaggacca

SEQ ID NO: 1232 - RNA, 20 nt, synthetic construct
  source 1..20: mol_type = other RNA
aaataaaatccaaaccgcct

SEQ ID NO: 1233 - RNA, 20 nt, synthetic construct
  source 1..20: mol_type = other RNA
aaatccaaaccgccttccaa

SEQ ID NO: 1234 - RNA, 20 nt, synthetic construct
  source 1..20: mol_type = other RNA
aaatgaattcattctcctga

SEQ ID NO: 1235 - RNA, 20 nt, synthetic construct
  source 1..20: mol_type = other RNA
aaatgcatcttacaccaaac

SEQ ID NO: 1236 - RNA, 20 nt, synthetic construct
  source 1..20: mol_type = other RNA
aaatttcgtagtcgtaggat

SEQ ID NO: 1237 - RNA, 20 nt, synthetic construct
  source 1..20: mol_type = other RNA
aaccaagtcccagacatgtc

SEQ ID NO: 1238 - RNA, 20 nt, synthetic construct
  source 1..20: mol_type = other RNA
aaccgccttccaagtggggc

SEQ ID NO: 1239 - RNA, 20 nt, synthetic construct
  source 1..20: mol_type = other RNA
aactcatctggcattaaaaa

SEQ ID NO: 1240 - RNA, 20 nt, synthetic construct
  source 1..20: mol_type = other RNA
aactccacaagtgtgtcaag

SEQ ID NO: 1241 - RNA, 20 nt, synthetic construct
  source 1..20: mol_type = other RNA
aacttgacacacttgtggag

SEQ ID NO: 1242 - RNA, 20 nt, synthetic construct
  source 1..20: mol_type = other RNA
aagaatccacaaaacacaca

SEQ ID NO: 1243 - RNA, 20 nt, synthetic construct
  source 1..20: mol_type = other RNA
aagagccccacttggaaggc

SEQ ID NO: 1244 - RNA, 20 nt, synthetic construct
  source 1..20: mol_type = other RNA
aagatgcatttgtaaagcaa

SEQ ID NO: 1245 - RNA, 20 nt, synthetic construct
  source 1..20: mol_type = other RNA
aagcaaagggatggagaagg

SEQ ID NO: 1246 - RNA, 20 nt, synthetic construct
  source 1..20: mol_type = other RNA
aagcggaacttgacacactt

SEQ ID NO: 1247 - RNA, 20 nt, synthetic construct
  source 1..20: mol_type = other RNA
aaggaagcaaagggatggag

SEQ ID NO: 1248 - RNA, 20 nt, synthetic construct
  source 1..20: mol_type = other RNA
aaggaccaagtacagccgta

SEQ ID NO: 1249 - RNA, 20 nt, synthetic construct
  source 1..20: mol_type = other RNA
aaggcggtttggattttatt

SEQ ID NO: 1250 - RNA, 20 nt, synthetic construct
  source 1..20: mol_type = other RNA
aagggatggagaaggaccaa

SEQ ID NO: 1251 - RNA, 20 nt, synthetic construct
  source 1..20: mol_type = other RNA
aagtacagccgtaaaactcc

SEQ ID NO: 1252 - RNA, 20 nt, synthetic construct
  source 1..20: mol_type = other RNA
aagtcccagacatgtcagga

SEQ ID NO: 1253 - RNA, 20 nt, synthetic construct
  source 1..20: mol_type = other RNA
aagtgtgtcaagttccgctt

SEQ ID NO: 1254 - RNA, 20 nt, synthetic construct
  source 1..20: mol_type = other RNA
aagttccgctttgtgctgat

SEQ ID NO: 1255 - RNA, 20 nt, synthetic construct
  source 1..20: mol_type = other RNA
aataaaatccaaaccgcctt

SEQ ID NO: 1256 - RNA, 20 nt, synthetic construct
  source 1..20: mol_type = other RNA
aatccaaaccgccttccaag

SEQ ID NO: 1257 - RNA, 20 nt, synthetic construct
  source 1..20: mol_type = other RNA
aatccacaaaacacacaaat

SEQ ID NO: 1258 - RNA, 20 nt, synthetic construct
  source 1..20: mol_type = other RNA
aatgaattcattctcctgac

SEQ ID NO: 1259 - RNA, 20 nt, synthetic construct
  source 1..20: mol_type = other RNA
aatgcatcttacaccaaact

SEQ ID NO: 1260 - RNA, 20 nt, synthetic construct
  source 1..20: mol_type = other RNA
aatgccagatgagtttggtg

SEQ ID NO: 1261 - RNA, 20 nt, synthetic construct
  source 1..20: mol_type = other RNA
aattcattctcctgacatgt

SEQ ID NO: 1262 - RNA, 20 nt, synthetic construct
  source 1..20: mol_type = other RNA
aatttcgtagtcgtaggatc

SEQ ID NO: 1263 - RNA, 20 nt, synthetic construct
  source 1..20: mol_type = other RNA
acaaagcggaacttgacaca

SEQ ID NO: 1264 - RNA, 20 nt, synthetic construct
  source 1..20: mol_type = other RNA
acaaataaaatccaaaccgc

SEQ ID NO: 1265 - RNA, 20 nt, synthetic construct
  source 1..20: mol_type = other RNA
acaaatgcatcttacaccaa

SEQ ID NO: 1266 - RNA, 20 nt, synthetic construct
  source 1..20: mol_type = other RNA
acaagtgtgtcaagttccgc

SEQ ID NO: 1267 - RNA, 20 nt, synthetic construct
  source 1..20: mol_type = other RNA
acacaaataaaatccaaacc

SEQ ID NO: 1268 - RNA, 20 nt, synthetic construct
  source 1..20: mol_type = other RNA
acacacttgtggagttttac

SEQ ID NO: 1269 - RNA, 20 nt, synthetic construct
  source 1..20: mol_type = other RNA
acaccaaactcatctggcat

SEQ ID NO: 1270 - RNA, 20 nt, synthetic construct
  source 1..20: mol_type = other RNA
acacttgtggagttttacgg

SEQ ID NO: 1271 - RNA, 20 nt, synthetic construct
  source 1..20: mol_type = other RNA
acagccgtaaaactccacaa

SEQ ID NO: 1272 - RNA, 20 nt, synthetic construct
  source 1..20: mol_type = other RNA
acatgtcaggagaatgaatt

SEQ ID NO: 1273 - RNA, 20 nt, synthetic construct
  source 1..20: mol_type = other RNA
acatgtctgggacttggttt

SEQ ID NO: 1274 - RNA, 20 nt, synthetic construct
  source 1..20: mol_type = other RNA
accaaactcatctggcatta

SEQ ID NO: 1275 - RNA, 20 nt, synthetic construct
  source 1..20: mol_type = other RNA
accaagtacagccgtaaaac

SEQ ID NO: 1276 - RNA, 20 nt, synthetic construct
  source 1..20: mol_type = other RNA
accaagtcccagacatgtca

SEQ ID NO: 1277 - RNA, 20 nt, synthetic construct
  source 1..20: mol_type = other RNA
accgccttccaagtggggct

SEQ ID NO: 1278 - RNA, 20 nt, synthetic construct
  source 1..20: mol_type = other RNA
acggctgtacttggtccttc

SEQ ID NO: 1279 - RNA, 20 nt, synthetic construct
  source 1..20: mol_type = other RNA
actcatctggcattaaaaat

SEQ ID NO: 1280 - RNA, 20 nt, synthetic construct
  source 1..20: mol_type = other RNA
actccacaagtgtgtcaagt

SEQ ID NO: 1281 - RNA, 20 nt, synthetic construct
  source 1..20: mol_type = other RNA
acttgacacacttgtggagt

SEQ ID NO: 1282 - RNA, 20 nt, synthetic construct
  source 1..20: mol_type = other RNA
acttggaaggcggtttggat

SEQ ID NO: 1283 - RNA, 20 nt, synthetic construct
  source 1..20: mol_type = other RNA
acttggtccttctccatccc

SEQ ID NO: 1284 - RNA, 20 nt, synthetic construct
  source 1..20: mol_type = other RNA
acttggtttaggaaaaggaa

SEQ ID NO: 1285 - RNA, 20 nt, synthetic construct
  source 1..20: mol_type = other RNA
acttgtggagttttacggct

SEQ ID NO: 1286 - RNA, 20 nt, synthetic construct
  source 1..20: mol_type = other RNA
agaaggaccaagtacagccg

SEQ ID NO: 1287 - RNA, 20 nt, synthetic construct
  source 1..20: mol_type = other RNA
agaatccacaaaacacacaa

SEQ ID NO: 1288 - RNA, 20 nt, synthetic construct
  source 1..20: mol_type = other RNA
agacatgtcaggagaatgaa

SEQ ID NO: 1289 - RNA, 20 nt, synthetic construct
  source 1..20: mol_type = other RNA
agagccccacttggaaggcg

SEQ ID NO: 1290 - RNA, 20 nt, synthetic construct
  source 1..20: mol_type = other RNA
agatgagtttggtgtaagat

SEQ ID NO: 1291 - RNA, 20 nt, synthetic construct
  source 1..20: mol_type = other RNA
agatgcatttgtaaagcaaa

SEQ ID NO: 1292 - RNA, 20 nt, synthetic construct
  source 1..20: mol_type = other RNA
agcaaagggatggagaagga

SEQ ID NO: 1293 - RNA, 20 nt, synthetic construct
  source 1..20: mol_type = other RNA
agcacaaagcggaacttgac

SEQ ID NO: 1294 - RNA, 20 nt, synthetic construct
  source 1..20: mol_type = other RNA
agccccacttggaaggcggt

SEQ ID NO: 1295 - RNA, 20 nt, synthetic construct
  source 1..20: mol_type = other RNA
agccgtaaaactccacaagt

SEQ ID NO: 1296 - RNA, 20 nt, synthetic construct
  source 1..20: mol_type = other RNA
agcggaacttgacacacttg

SEQ ID NO: 1297 - RNA, 20 nt, synthetic construct
  source 1..20: mol_type = other RNA
aggaaaaggaagcaaaggga

SEQ ID NO: 1298 - RNA, 20 nt, synthetic construct
  source 1..20: mol_type = other RNA
aggaagcaaagggatggaga

SEQ ID NO: 1299 - RNA, 20 nt, synthetic construct
  source 1..20: mol_type = other RNA
aggaccaagtacagccgtaa

SEQ ID NO: 1300 - RNA, 20 nt, synthetic construct
  source 1..20: mol_type = other RNA
aggatcagcacaaagcggaa

SEQ ID NO: 1301 - RNA, 20 nt, synthetic construct
  source 1..20: mol_type = other RNA
aggcggtttggattttattt

SEQ ID NO: 1302 - RNA, 20 nt, synthetic construct
  source 1..20: mol_type = other RNA
agggatggagaaggaccaag

SEQ ID NO: 1303 - RNA, 20 nt, synthetic construct
  source 1..20: mol_type = other RNA
agtacagccgtaaaactcca

SEQ ID NO: 1304 - RNA, 20 nt, synthetic construct
  source 1..20: mol_type = other RNA
agtcccagacatgtcaggag

SEQ ID NO: 1305 - RNA, 20 nt, synthetic construct
  source 1..20: mol_type = other RNA
agtcgtaggatcagcacaaa

SEQ ID NO: 1306 - RNA, 20 nt, synthetic construct
  source 1..20: mol_type = other RNA
agtgtgtcaagttccgcttt

SEQ ID NO: 1307 - RNA, 20 nt, synthetic construct
  source 1..20: mol_type = other RNA
agttccgctttgtgctgatc

SEQ ID NO: 1308 - RNA, 20 nt, synthetic construct
  source 1..20: mol_type = other RNA
agtttggtgtaagatgcatt

SEQ ID NO: 1309 - RNA, 20 nt, synthetic construct
  source 1..20: mol_type = other RNA
agttttacggctgtacttgg

SEQ ID NO: 1310 - RNA, 20 nt, synthetic construct
  source 1..20: mol_type = other RNA
ataaaatccaaaccgccttc

SEQ ID NO: 1311 - RNA, 20 nt, synthetic construct
  source 1..20: mol_type = other RNA
atcagcacaaagcggaactt

SEQ ID NO: 1312 - RNA, 20 nt, synthetic construct
  source 1..20: mol_type = other RNA
atccaaaccgccttccaagt

SEQ ID NO: 1313 - RNA, 20 nt, synthetic construct
  source 1..20: mol_type = other RNA
atccacaaaacacacaaata

SEQ ID NO: 1314 - RNA, 20 nt, synthetic construct
  source 1..20: mol_type = other RNA
atccctttgcttccttttcc

SEQ ID NO: 1315 - RNA, 20 nt, synthetic construct
  source 1..20: mol_type = other RNA
atcttacaccaaactcatct

SEQ ID NO: 1316 - RNA, 20 nt, synthetic construct
  source 1..20: mol_type = other RNA
atgaaagagccccacttgga

SEQ ID NO: 1317 - RNA, 20 nt, synthetic construct
  source 1..20: mol_type = other RNA
atgaattcattctcctgaca

SEQ ID NO: 1318 - RNA, 20 nt, synthetic construct
  source 1..20: mol_type = other RNA
atgagtttggtgtaagatgc

SEQ ID NO: 1319 - RNA, 20 nt, synthetic construct
  source 1..20: mol_type = other RNA
atgcatcttacaccaaactc

SEQ ID NO: 1320 - RNA, 20 nt, synthetic construct
  source 1..20: mol_type = other RNA
atgccagatgagtttggtgt

SEQ ID NO: 1321 - RNA, 20 nt, synthetic construct
  source 1..20: mol_type = other RNA
atggagaaggaccaagtaca

SEQ ID NO: 1322 - RNA, 20 nt, synthetic construct
  source 1..20: mol_type = other RNA
atgtcaggagaatgaattca

SEQ ID NO: 1323 - RNA, 20 nt, synthetic construct
  source 1..20: mol_type = other RNA
atgtctgggacttggtttag

SEQ ID NO: 1324 - RNA, 20 nt, synthetic construct
  source 1..20: mol_type = other RNA
attcattctcctgacatgtc

SEQ ID NO: 1325 - RNA, 20 nt, synthetic construct
  source 1..20: mol_type = other RNA
attctcctgacatgtctggg

SEQ ID NO: 1326 - RNA, 20 nt, synthetic construct
  source 1..20: mol_type = other RNA
atttcgtagtcgtaggatca

SEQ ID NO: 1327 - RNA, 20 nt, synthetic construct
  source 1..20: mol_type = other RNA
atttgtgtgttttgtggatt

SEQ ID NO: 1328 - RNA, 20 nt, synthetic construct
  source 1..20: mol_type = other RNA
atttttaatgccagatgagt

SEQ ID NO: 1329 - RNA, 20 nt, synthetic construct
  source 1..20: mol_type = other RNA
caaaccgccttccaagtggg

SEQ ID NO: 1330 - RNA, 20 nt, synthetic construct
  source 1..20: mol_type = other RNA
caaactcatctggcattaaa

SEQ ID NO: 1331 - RNA, 20 nt, synthetic construct
  source 1..20: mol_type = other RNA
caaagcggaacttgacacac

SEQ ID NO: 1332 - RNA, 20 nt, synthetic construct
  source 1..20: mol_type = other RNA
caaagggatggagaaggacc

SEQ ID NO: 1333 - RNA, 20 nt, synthetic construct
  source 1..20: mol_type = other RNA
caaataaaatccaaaccgcc

SEQ ID NO: 1334 - RNA, 20 nt, synthetic construct
  source 1..20: mol_type = other RNA
caaatgcatcttacaccaaa

SEQ ID NO: 1335 - RNA, 20 nt, synthetic construct
  source 1..20: mol_type = other RNA
caagtacagccgtaaaactc

SEQ ID NO: 1336 - RNA, 20 nt, synthetic construct
  source 1..20: mol_type = other RNA
caagtcccagacatgtcagg

SEQ ID NO: 1337 - RNA, 20 nt, synthetic construct
  source 1..20: mol_type = other RNA
caagtgtgtcaagttccgct

SEQ ID NO: 1338 - RNA, 20 nt, synthetic construct
  source 1..20: mol_type = other RNA
caagttccgctttgtgctga

SEQ ID NO: 1339 - RNA, 20 nt, synthetic construct
  source 1..20: mol_type = other RNA
cacaaagcggaacttgacac

SEQ ID NO: 1340 - RNA, 20 nt, synthetic construct
  source 1..20: mol_type = other RNA
cacaaataaaatccaaaccg

SEQ ID NO: 1341 - RNA, 20 nt, synthetic construct
  source 1..20: mol_type = other RNA
cacaagtgtgtcaagttccg

SEQ ID NO: 1342 - RNA, 20 nt, synthetic construct
  source 1..20: mol_type = other RNA
cacacaaataaaatccaaac

SEQ ID NO: 1343 - RNA, 20 nt, synthetic construct
  source 1..20: mol_type = other RNA
cacacttgtggagttttacg

SEQ ID NO: 1344 - RNA, 20 nt, synthetic construct
  source 1..20: mol_type = other RNA
caccaaactcatctggcatt

SEQ ID NO: 1345 - RNA, 20 nt, synthetic construct
  source 1..20: mol_type = other RNA
cacttggaaggcggtttgga

SEQ ID NO: 1346 - RNA, 20 nt, synthetic construct
  source 1..20: mol_type = other RNA
cacttgtggagttttacggc

SEQ ID NO: 1347 - RNA, 20 nt, synthetic construct
  source 1..20: mol_type = other RNA
cagacatgtcaggagaatga

SEQ ID NO: 1348 - RNA, 20 nt, synthetic construct
  source 1..20: mol_type = other RNA
cagatgagtttggtgtaaga

SEQ ID NO: 1349 - RNA, 20 nt, synthetic construct
  source 1..20: mol_type = other RNA
cagcacaaagcggaacttga

SEQ ID NO: 1350 - RNA, 20 nt, synthetic construct
  source 1..20: mol_type = other RNA
cagccgtaaaactccacaag

SEQ ID NO: 1351 - RNA, 20 nt, synthetic construct
  source 1..20: mol_type = other RNA
caggagaatgaattcatttt

SEQ ID NO: 1352 - RNA, 20 nt, synthetic construct
  source 1..20: mol_type = other RNA
catccctttgcttccttttc

SEQ ID NO: 1353 - RNA, 20 nt, synthetic construct
  source 1..20: mol_type = other RNA
catctggcattaaaaatgaa

SEQ ID NO: 1354 - RNA, 20 nt, synthetic construct
  source 1..20: mol_type = other RNA
catcttacaccaaactcatc

SEQ ID NO: 1355 - RNA, 20 nt, synthetic construct
  source 1..20: mol_type = other RNA
catgaaagagccccacttgg

SEQ ID NO: 1356 - RNA, 20 nt, synthetic construct
  source 1..20: mol_type = other RNA
catgtcaggagaatgaattc

SEQ ID NO: 1357 - RNA, 20 nt, synthetic construct
  source 1..20: mol_type = other RNA
catgtctgggacttggttta

SEQ ID NO: 1358 - RNA, 20 nt, synthetic construct
  source 1..20: mol_type = other RNA
cattctcctgacatgtctgg

SEQ ID NO: 1359 - RNA, 20 nt, synthetic construct
  source 1..20: mol_type = other RNA
catttttaatgccagatgag

SEQ ID NO: 1360 - RNA, 20 nt, synthetic construct
  source 1..20: mol_type = other RNA
ccaaaccgccttccaagtgg

SEQ ID NO: 1361 - RNA, 20 nt, synthetic construct
  source 1..20: mol_type = other RNA
ccaaactcatctggcattaa

SEQ ID NO: 1362 - RNA, 20 nt, synthetic construct
  source 1..20: mol_type = other RNA
ccaagtacagccgtaaaact

SEQ ID NO: 1363 - RNA, 20 nt, synthetic construct
  source 1..20: mol_type = other RNA
ccaagtcccagacatgtcag

SEQ ID NO: 1364 - RNA, 20 nt, synthetic construct
  source 1..20: mol_type = other RNA
ccacaaaacacacaaataaa

SEQ ID NO: 1365 - RNA, 20 nt, synthetic construct
  source 1..20: mol_type = other RNA
ccacaagtgtgtcaagttcc

SEQ ID NO: 1366 - RNA, 20 nt, synthetic construct
  source 1..20: mol_type = other RNA
ccacttggaaggcggtttgg

SEQ ID NO: 1367 - RNA, 20 nt, synthetic construct
  source 1..20: mol_type = other RNA
ccagacatgtcaggagaatg

SEQ ID NO: 1368 - RNA, 20 nt, synthetic construct
  source 1..20: mol_type = other RNA
ccagatgagtttggtgtaag

SEQ ID NO: 1369 - RNA, 20 nt, synthetic construct
  source 1..20: mol_type = other RNA
ccatccctttgcttcctttt

SEQ ID NO: 1370 - RNA, 20 nt, synthetic construct
  source 1..20: mol_type = other RNA
cccacttggaaggcggtttg

SEQ ID NO: 1371 - RNA, 20 nt, synthetic construct
  source 1..20: mol_type = other RNA
cccagacatgtcaggagaat

SEQ ID NO: 1372 - RNA, 20 nt, synthetic construct
  source 1..20: mol_type = other RNA
ccccacttggaaggcggttt

SEQ ID NO: 1373 - RNA, 20 nt, synthetic construct
  source 1..20: mol_type = other RNA
ccctttgcttccttttccta

SEQ ID NO: 1374 - RNA, 20 nt, synthetic construct
  source 1..20: mol_type = other RNA
ccgccttccaagtggggctc

SEQ ID NO: 1375 - RNA, 20 nt, synthetic construct
  source 1..20: mol_type = other RNA
ccgctttgtgctgatcctac

SEQ ID NO: 1376 - RNA, 20 nt, synthetic construct
  source 1..20: mol_type = other RNA
ccgtaaaactccacaagtgt

SEQ ID NO: 1377 - RNA, 20 nt, synthetic construct
  source 1..20: mol_type = other RNA
cctaaaccaagtcccagaca

SEQ ID NO: 1378 - RNA, 20 nt, synthetic construct
  source 1..20: mol_type = other RNA
cctgacatgtctgggacttg

SEQ ID NO: 1379 - RNA, 20 nt, synthetic construct
  source 1..20: mol_type = other RNA
ccttctccatccctttgctt

SEQ ID NO: 1380 - RNA, 20 nt, synthetic construct
  source 1..20: mol_type = other RNA
cctttgcttccttttcctaa

SEQ ID NO: 1381 - RNA, 20 nt, synthetic construct
  source 1..20: mol_type = other RNA
ccttttcctaaaccaagtcc

SEQ ID NO: 1382 - RNA, 20 nt, synthetic construct
  source 1..20: mol_type = other RNA
cgctttgtgctgatcctacg

SEQ ID NO: 1383 - RNA, 20 nt, synthetic construct
  source 1..20: mol_type = other RNA
cggaacttgacacacttgtg

SEQ ID NO: 1384 - RNA, 20 nt, synthetic construct
  source 1..20: mol_type = other RNA
cggctgtacttggtccttct

SEQ ID NO: 1385 - RNA, 20 nt, synthetic construct
  source 1..20: mol_type = other RNA
cggtttggattttatttgtg

SEQ ID NO: 1386 - RNA, 20 nt, synthetic construct
  source 1..20: mol_type = other RNA
cgtaaaactccacaagtgtg

SEQ ID NO: 1387 - RNA, 20 nt, synthetic construct
  source 1..20: mol_type = other RNA
cgtaggatcagcacaaagcg

SEQ ID NO: 1388 - RNA, 20 nt, synthetic construct
  source 1..20: mol_type = other RNA
cgtagtcgtaggatcagcac

SEQ ID NO: 1389 - RNA, 20 nt, synthetic construct
  source 1..20: mol_type = other RNA
ctaaaccaagtcccagacat

SEQ ID NO: 1390 - RNA, 20 nt, synthetic construct
  source 1..20: mol_type = other RNA
ctcatctggcattaaaaatg

SEQ ID NO: 1391 - RNA, 20 nt, synthetic construct
  source 1..20: mol_type = other RNA
ctccacaagtgtgtcaagtt

SEQ ID NO: 1392 - RNA, 20 nt, synthetic construct
  source 1..20: mol_type = other RNA
ctccatccctttgcttcctt

SEQ ID NO: 1393 - RNA, 20 nt, synthetic construct
  source 1..20: mol_type = other RNA
ctcctgacatgtctgggact

SEQ ID NO: 1394 - RNA, 20 nt, synthetic construct
  source 1..20: mol_type = other RNA
ctgacatgtctgggacttgg

SEQ ID NO: 1395 - RNA, 20 nt, synthetic construct
  source 1..20: mol_type = other RNA
ctgatcctacgactacgaaa

SEQ ID NO: 1396 - RNA, 20 nt, synthetic construct
  source 1..20: mol_type = other RNA
ctggcattaaaaatgaattc

SEQ ID NO: 1397 - RNA, 20 nt, synthetic construct
  source 1..20: mol_type = other RNA
ctgggacttggtttaggaaa

SEQ ID NO: 1398 - RNA, 20 nt, synthetic construct
  source 1..20: mol_type = other RNA
ctgtacttggtccttctcca

SEQ ID NO: 1399 - RNA, 20 nt, synthetic construct
  source 1..20: mol_type = other RNA
cttacaccaaactcatctgg

SEQ ID NO: 1400 - RNA, 20 nt, synthetic construct
  source 1..20: mol_type = other RNA
cttccttttcctaaaccaag

SEQ ID NO: 1401 - RNA, 20 nt, synthetic construct
  source 1..20: mol_type = other RNA
cttctccatccctttgcttc

SEQ ID NO: 1402 - RNA, 20 nt, synthetic construct
  source 1..20: mol_type = other RNA
cttgacacacttgtggagtt

SEQ ID NO: 1403 - RNA, 20 nt, synthetic construct
  source 1..20: mol_type = other RNA
cttggaaggcggtttggatt

SEQ ID NO: 1404 - RNA, 20 nt, synthetic construct
  source 1..20: mol_type = other RNA
cttggtccttctccatccct

SEQ ID NO: 1405 - RNA, 20 nt, synthetic construct
  source 1..20: mol_type = other RNA
cttggtttaggaaaaggaag

SEQ ID NO: 1406 - RNA, 20 nt, synthetic construct
  source 1..20: mol_type = other RNA
cttgtggagttttacggctg

SEQ ID NO: 1407 - RNA, 20 nt, synthetic construct
  source 1..20: mol_type = other RNA
ctttacaaatgcatcttaca

SEQ ID NO: 1408 - RNA, 20 nt, synthetic construct
  source 1..20: mol_type = other RNA
ctttgcttccttttcctaaa

SEQ ID NO: 1409 - RNA, 20 nt, synthetic construct
  source 1..20: mol_type = other RNA
ctttgtgctgatcctacgac

SEQ ID NO: 1410 - RNA, 20 nt, synthetic construct
  source 1..20: mol_type = other RNA
cttttcctaaaccaagtccc

SEQ ID NO: 1411 - RNA, 20 nt, synthetic construct
  source 1..20: mol_type = other RNA
gaaaaggaagcaaagggatg

SEQ ID NO: 1412 - RNA, 20 nt, synthetic construct
  source 1..20: mol_type = other RNA
gaaagagccccacttggaag

SEQ ID NO: 1413 - RNA, 20 nt, synthetic construct
  source 1..20: mol_type = other RNA
gaacttgacacacttgtgga

SEQ ID NO: 1414 - RNA, 20 nt, synthetic construct
  source 1..20: mol_type = other RNA
gaagcaaagggatggagaag

SEQ ID NO: 1415 - RNA, 20 nt, synthetic construct
  source 1..20: mol_type = other RNA
gaaggaccaagtacagccgt

SEQ ID NO: 1416 - RNA, 20 nt, synthetic construct
  source 1..20: mol_type = other RNA
gaaggcggtttggattttat

SEQ ID NO: 1417 - RNA, 20 nt, synthetic construct
  source 1..20: mol_type = other RNA
gaatccacaaaacacacaaa

SEQ ID NO: 1418 - RNA, 20 nt, synthetic construct
  source 1..20: mol_type = other RNA
gaattcattctcctgacatg

SEQ ID NO: 1419 - RNA, 20 nt, synthetic construct
  source 1..20: mol_type = other RNA
gaattcatttttaatgccag

SEQ ID NO: 1420 - RNA, 20 nt, synthetic construct
  source 1..20: mol_type = other RNA
gacacacttgtggagtttta

SEQ ID NO: 1421 - RNA, 20 nt, synthetic construct
  source 1..20: mol_type = other RNA
gacatgtcaggagaatgaat

SEQ ID NO: 1422 - RNA, 20 nt, synthetic construct
  source 1..20: mol_type = other RNA
gacatgtctgggacttggtt

SEQ ID NO: 1423 - RNA, 20 nt, synthetic construct
  source 1..20: mol_type = other RNA
gaccaagtacagccgtaaaa

SEQ ID NO: 1424 - RNA, 20 nt, synthetic construct
  source 1..20: mol_type = other RNA
gacttggtttaggaaaagga

SEQ ID NO: 1425 - RNA, 20 nt, synthetic construct
  source 1..20: mol_type = other RNA
gagaaggaccaagtacagcc

SEQ ID NO: 1426 - RNA, 20 nt, synthetic construct
  source 1..20: mol_type = other RNA
gagccccacttggaaggcgg

SEQ ID NO: 1427 - RNA, 20 nt, synthetic construct
  source 1..20: mol_type = other RNA
gagtttggtgtaagatgcat

SEQ ID NO: 1428 - RNA, 20 nt, synthetic construct
  source 1..20: mol_type = other RNA
gagttttacggctgtacttg

SEQ ID NO: 1429 - RNA, 20 nt, synthetic construct
  source 1..20: mol_type = other RNA
gatcagcacaaagcggaact

SEQ ID NO: 1430 - RNA, 20 nt, synthetic construct
  source 1..20: mol_type = other RNA
gatcctacgactacgaaatt

SEQ ID NO: 1431 - RNA, 20 nt, synthetic construct
  source 1..20: mol_type = other RNA
gatgagtttggtgtaagatg

SEQ ID NO: 1432 - RNA, 20 nt, synthetic construct
  source 1..20: mol_type = other RNA
gatgcatttgtaaagcaaaa

SEQ ID NO: 1433 - RNA, 20 nt, synthetic construct
  source 1..20: mol_type = other RNA
gatggagaaggaccaagtac

SEQ ID NO: 1434 - RNA, 20 nt, synthetic construct
  source 1..20: mol_type = other RNA
gcaaaataaaaagaatccac

SEQ ID NO: 1435 - RNA, 20 nt, synthetic construct
  source 1..20: mol_type = other RNA
gcaaagggatggagaaggac

SEQ ID NO: 1436 - RNA, 20 nt, synthetic construct
  source 1..20: mol_type = other RNA
gcacaaagcggaacttgaca

SEQ ID NO: 1437 - RNA, 20 nt, synthetic construct
  source 1..20: mol_type = other RNA
gcatcttacaccaaactcat

SEQ ID NO: 1438 - RNA, 20 nt, synthetic construct
  source 1..20: mol_type = other RNA
gcatgaaagagccccacttg

SEQ ID NO: 1439 - RNA, 20 nt, synthetic construct
  source 1..20: mol_type = other RNA
gccagatgagtttggtgtaa

SEQ ID NO: 1440 - RNA, 20 nt, synthetic construct
  source 1..20: mol_type = other RNA
gccccacttggaaggcggtt

SEQ ID NO: 1441 - RNA, 20 nt, synthetic construct
  source 1..20: mol_type = other RNA
gccgtaaaactccacaagtg

SEQ ID NO: 1442 - RNA, 20 nt, synthetic construct
  source 1..20: mol_type = other RNA
gcggaacttgacacacttgt

SEQ ID NO: 1443 - RNA, 20 nt, synthetic construct
  source 1..20: mol_type = other RNA
gcggtttggattttatttgt

SEQ ID NO: 1444 - RNA, 20 nt, synthetic construct
  source 1..20: mol_type = other RNA
gctgatcctacgactacgaa

SEQ ID NO: 1445 - RNA, 20 nt, synthetic construct
  source 1..20: mol_type = other RNA
gctgtacttggtccttctcc

SEQ ID NO: 1446 - RNA, 20 nt, synthetic construct
  source 1..20: mol_type = other RNA
gcttccttttcctaaaccaa

SEQ ID NO: 1447 - RNA, 20 nt, synthetic construct
  source 1..20: mol_type = other RNA
gctttacaaatgcatcttac

SEQ ID NO: 1448 - RNA, 20 nt, synthetic construct
  source 1..20: mol_type = other RNA
gctttgtgctgatcctacga

SEQ ID NO: 1449 - RNA, 20 nt, synthetic construct
  source 1..20: mol_type = other RNA
ggaaaaggaagcaaagggat

SEQ ID NO: 1450 - RNA, 20 nt, synthetic construct
  source 1..20: mol_type = other RNA
ggaacttgacacacttgtgg

SEQ ID NO: 1451 - RNA, 20 nt, synthetic construct
  source 1..20: mol_type = other RNA
ggaagcaaagggatggagaa

SEQ ID NO: 1452 - RNA, 20 nt, synthetic construct
  source 1..20: mol_type = other RNA
ggaaggcggtttggatttta

SEQ ID NO: 1453 - RNA, 20 nt, synthetic construct
  source 1..20: mol_type = other RNA
ggaccaagtacagccgtaaa

SEQ ID NO: 1454 - RNA, 20 nt, synthetic construct
  source 1..20: mol_type = other RNA
ggacttggtttaggaaaagg

SEQ ID NO: 1455 - RNA, 20 nt, synthetic construct
  source 1..20: mol_type = other RNA
ggagaaggaccaagtacagc

SEQ ID NO: 1456 - RNA, 20 nt, synthetic construct
  source 1..20: mol_type = other RNA
ggagttttacggctgtactt

SEQ ID NO: 1457 - RNA, 20 nt, synthetic construct
  source 1..20: mol_type = other RNA
ggatcagcacaaagcggaac

SEQ ID NO: 1458 - RNA, 20 nt, synthetic construct
  source 1..20: mol_type = other RNA
ggatggagaaggaccaagta

SEQ ID NO: 1459 - RNA, 20 nt, synthetic construct
  source 1..20: mol_type = other RNA
ggcggtttggattttatttg

SEQ ID NO: 1460 - RNA, 20 nt, synthetic construct
  source 1..20: mol_type = other RNA
ggctgtacttggtccttctc

SEQ ID NO: 1461 - RNA, 20 nt, synthetic construct
  source 1..20: mol_type = other RNA
gggacttggtttaggaaaag

SEQ ID NO: 1462 - RNA, 20 nt, synthetic construct
  source 1..20: mol_type = other RNA
gggatggagaaggaccaagt

SEQ ID NO: 1463 - RNA, 20 nt, synthetic construct
  source 1..20: mol_type = other RNA
ggtaaatttcgtagtcgtag

SEQ ID NO: 1464 - RNA, 20 nt, synthetic construct
  source 1..20: mol_type = other RNA
ggtccttctccatccctttg

SEQ ID NO: 1465 - RNA, 20 nt, synthetic construct
  source 1..20: mol_type = other RNA
ggtgtaagatgcatttgtaa

SEQ ID NO: 1466 - RNA, 20 nt, synthetic construct
  source 1..20: mol_type = other RNA
ggtttaggaaaaggaagcaa

SEQ ID NO: 1467 - RNA, 20 nt, synthetic construct
  source 1..20: mol_type = other RNA
ggtttggattttatttgtgt

SEQ ID NO: 1468 - RNA, 20 nt, synthetic construct
  source 1..20: mol_type = other RNA
gtaaaactccacaagtgtgt

SEQ ID NO: 1469 - RNA, 20 nt, synthetic construct
  source 1..20: mol_type = other RNA
gtaaatttcgtagtcgtagg

SEQ ID NO: 1470 - RNA, 20 nt, synthetic construct
  source 1..20: mol_type = other RNA
gtaagatgcatttgtaaagc

SEQ ID NO: 1471 - RNA, 20 nt, synthetic construct
  source 1..20: mol_type = other RNA
gtacagccgtaaaactccac

SEQ ID NO: 1472 - RNA, 20 nt, synthetic construct
  source 1..20: mol_type = other RNA
gtacttggtccttctccatc

SEQ ID NO: 1473 - RNA, 20 nt, synthetic construct
  source 1..20: mol_type = other RNA
gtaggatcagcacaaagcgg

SEQ ID NO: 1474 - RNA, 20 nt, synthetic construct
  source 1..20: mol_type = other RNA
gtagtcgtaggatcagcaca

SEQ ID NO: 1475 - RNA, 20 nt, synthetic construct
  source 1..20: mol_type = other RNA
gtcaagttccgctttgtgct

SEQ ID NO: 1476 - RNA, 20 nt, synthetic construct
  source 1..20: mol_type = other RNA
gtcaggagaatgaattcatt

SEQ ID NO: 1477 - RNA, 20 nt, synthetic construct
  source 1..20: mol_type = other RNA
gtcccagacatgtcaggaga

SEQ ID NO: 1478 - RNA, 20 nt, synthetic construct
  source 1..20: mol_type = other RNA
gtccttctccatccctttgc

SEQ ID NO: 1479 - RNA, 20 nt, synthetic construct
  source 1..20: mol_type = other RNA
gtcgtaggatcagcacaaag

SEQ ID NO: 1480 - RNA, 20 nt, synthetic construct
  source 1..20: mol_type = other RNA
gtctgggacttggtttagga

SEQ ID NO: 1481 - RNA, 20 nt, synthetic construct
  source 1..20: mol_type = other RNA
gtgctgatcctacgactacg

SEQ ID NO: 1482 - RNA, 20 nt, synthetic construct
  source 1..20: mol_type = other RNA
gtggagttttacggctgtac

SEQ ID NO: 1483 - RNA, 20 nt, synthetic construct
  source 1..20: mol_type = other RNA
gtggattctttttattttgc

SEQ ID NO: 1484 - RNA, 20 nt, synthetic construct
  source 1..20: mol_type = other RNA
gtgtaagatgcatttgtaaa

SEQ ID NO: 1485 - RNA, 20 nt, synthetic construct
  source 1..20: mol_type = other RNA
gtgtcaagttccgctttgtg

SEQ ID NO: 1486 - RNA, 20 nt, synthetic construct
  source 1..20: mol_type = other RNA
gtgtgtcaagttccgctttg

SEQ ID NO: 1487 - RNA, 20 nt, synthetic construct
  source 1..20: mol_type = other RNA
gtgtgttttgtggattcttt

SEQ ID NO: 1488 - RNA, 20 nt, synthetic construct
  source 1..20: mol_type = other RNA
gtgttttgtggattcttttt

SEQ ID NO: 1489 - RNA, 20 nt, synthetic construct
  source 1..20: mol_type = other RNA
gttccgctttgtgctgatcc

SEQ ID NO: 1490 - RNA, 20 nt, synthetic construct
  source 1..20: mol_type = other RNA
gtttaggaaaaggaagcaaa

SEQ ID NO: 1491 - RNA, 20 nt, synthetic construct
  source 1..20: mol_type = other RNA
gtttggattttatttgtgtg

SEQ ID NO: 1492 - RNA, 20 nt, synthetic construct
  source 1..20: mol_type = other RNA
gtttggtgtaagatgcattt

SEQ ID NO: 1493 - RNA, 20 nt, synthetic construct
  source 1..20: mol_type = other RNA
gttttacggctgtacttggt

SEQ ID NO: 1494 - RNA, 20 nt, synthetic construct
  source 1..20: mol_type = other RNA
taaaactccacaagtgtgtc

SEQ ID NO: 1495 - RNA, 20 nt, synthetic construct
  source 1..20: mol_type = other RNA
taaaatccaaaccgccttcc

SEQ ID NO: 1496 - RNA, 20 nt, synthetic construct
  source 1..20: mol_type = other RNA
taaaccaagtcccagacatg

SEQ ID NO: 1497 - RNA, 20 nt, synthetic construct
  source 1..20: mol_type = other RNA
taaatttcgtagtcgtagga

SEQ ID NO: 1498 - RNA, 20 nt, synthetic construct
  source 1..20: mol_type = other RNA
taagatgcatttgtaaagca

SEQ ID NO: 1499 - RNA, 20 nt, synthetic construct
  source 1..20: mol_type = other RNA
taatgccagatgagtttggt

SEQ ID NO: 1500 - RNA, 20 nt, synthetic construct
  source 1..20: mol_type = other RNA
tacaaatgcatcttacacca

SEQ ID NO: 1501 - RNA, 20 nt, synthetic construct
  source 1..20: mol_type = other RNA
tacaccaaactcatctggca

SEQ ID NO: 1502 - RNA, 20 nt, synthetic construct
  source 1..20: mol_type = other RNA
tacagccgtaaaactccaca

SEQ ID NO: 1503 - RNA, 20 nt, synthetic construct
  source 1..20: mol_type = other RNA
tacggctgtacttggtcctt

SEQ ID NO: 1504 - RNA, 20 nt, synthetic construct
  source 1..20: mol_type = other RNA
tacttggtccttctccatcc

SEQ ID NO: 1505 - RNA, 20 nt, synthetic construct
  source 1..20: mol_type = other RNA
taggaaaaggaagcaaaggg

SEQ ID NO: 1506 - RNA, 20 nt, synthetic construct
  source 1..20: mol_type = other RNA
taggatcagcacaaagcgga

SEQ ID NO: 1507 - RNA, 20 nt, synthetic construct
  source 1..20: mol_type = other RNA
tagtcgtaggatcagcacaa

SEQ ID NO: 1508 - RNA, 20 nt, synthetic construct
  source 1..20: mol_type = other RNA
tatttgtgtgttttgtggat

SEQ ID NO: 1509 - RNA, 20 nt, synthetic construct
  source 1..20: mol_type = other RNA
tcaagttccgctttgtgctg

SEQ ID NO: 1510 - RNA, 20 nt, synthetic construct
  source 1..20: mol_type = other RNA
tcagcacaaagcggaacttg

SEQ ID NO: 1511 - RNA, 20 nt, synthetic construct
  source 1..20: mol_type = other RNA
tcaggagaatgaattcattt

SEQ ID NO: 1512 - RNA, 20 nt, synthetic construct
  source 1..20: mol_type = other RNA
tcatctggcattaaaaatga

SEQ ID NO: 1513 - RNA, 20 nt, synthetic construct
  source 1..20: mol_type = other RNA
tcattctcctgacatgtctg

SEQ ID NO: 1514 - RNA, 20 nt, synthetic construct
  source 1..20: mol_type = other RNA
tcatttttaatgccagatga

SEQ ID NO: 1515 - RNA, 20 nt, synthetic construct
  source 1..20: mol_type = other RNA
tccaaaccgccttccaagtg

SEQ ID NO: 1516 - RNA, 20 nt, synthetic construct
  source 1..20: mol_type = other RNA
tccacaaaacacacaaataa

SEQ ID NO: 1517 - RNA, 20 nt, synthetic construct
  source 1..20: mol_type = other RNA
tccacaagtgtgtcaagttc

SEQ ID NO: 1518 - RNA, 20 nt, synthetic construct
  source 1..20: mol_type = other RNA
tccatccctttgcttccttt

SEQ ID NO: 1519 - RNA, 20 nt, synthetic construct
  source 1..20: mol_type = other RNA
tcccagacatgtcaggagaa

SEQ ID NO: 1520 - RNA, 20 nt, synthetic construct
  source 1..20: mol_type = other RNA
tccctttgcttccttttcct

SEQ ID NO: 1521 - RNA, 20 nt, synthetic construct
  source 1..20: mol_type = other RNA
tccgctttgtgctgatccta

SEQ ID NO: 1522 - RNA, 20 nt, synthetic construct
  source 1..20: mol_type = other RNA
tcctaaaccaagtcccagac

SEQ ID NO: 1523 - RNA, 20 nt, synthetic construct
  source 1..20: mol_type = other RNA
tcctgacatgtctgggactt

SEQ ID NO: 1524 - RNA, 20 nt, synthetic construct
  source 1..20: mol_type = other RNA
tccttctccatccctttgct

SEQ ID NO: 1525 - RNA, 20 nt, synthetic construct
  source 1..20: mol_type = other RNA
tccttttcctaaaccaagtc

SEQ ID NO: 1526 - RNA, 20 nt, synthetic construct
  source 1..20: mol_type = other RNA
tcgtaggatcagcacaaagc

SEQ ID NO: 1527 - RNA, 20 nt, synthetic construct
  source 1..20: mol_type = other RNA
tcgtagtcgtaggatcagca

SEQ ID NO: 1528 - RNA, 20 nt, synthetic construct
  source 1..20: mol_type = other RNA
tctccatccctttgcttcct

SEQ ID NO: 1529 - RNA, 20 nt, synthetic construct
  source 1..20: mol_type = other RNA
tctcctgacatgtctgggac

SEQ ID NO: 1530 - RNA, 20 nt, synthetic construct
  source 1..20: mol_type = other RNA
tctgggacttggtttaggaa

SEQ ID NO: 1531 - RNA, 20 nt, synthetic construct
  source 1..20: mol_type = other RNA
tcttacaccaaactcatctg

SEQ ID NO: 1532 - RNA, 20 nt, synthetic construct
  source 1..20: mol_type = other RNA
tgaaagagccccacttggaa

SEQ ID NO: 1533 - RNA, 20 nt, synthetic construct
  source 1..20: mol_type = other RNA
tgaattcattctcctgacat

SEQ ID NO: 1534 - RNA, 20 nt, synthetic construct
  source 1..20: mol_type = other RNA
tgacacacttgtggagtttt

SEQ ID NO: 1535 - RNA, 20 nt, synthetic construct
  source 1..20: mol_type = other RNA
tgacatgtctgggacttggt

SEQ ID NO: 1536 - RNA, 20 nt, synthetic construct
  source 1..20: mol_type = other RNA
tgagtttggtgtaagatgca

SEQ ID NO: 1537 - RNA, 20 nt, synthetic construct
  source 1..20: mol_type = other RNA
tgatcctacgactacgaaat

SEQ ID NO: 1538 - RNA, 20 nt, synthetic construct
  source 1..20: mol_type = other RNA
tgcatcttacaccaaactca

SEQ ID NO: 1539 - RNA, 20 nt, synthetic construct
  source 1..20: mol_type = other RNA
tgccagatgagtttggtgta

SEQ ID NO: 1540 - RNA, 20 nt, synthetic construct
  source 1..20: mol_type = other RNA
tgctgatcctacgactacga

SEQ ID NO: 1541 - RNA, 20 nt, synthetic construct
  source 1..20: mol_type = other RNA
tgcttccttttcctaaacca

SEQ ID NO: 1542 - RNA, 20 nt, synthetic construct
  source 1..20: mol_type = other RNA
tgctttacaaatgcatctta

SEQ ID NO: 1543 - RNA, 20 nt, synthetic construct
  source 1..20: mol_type = other RNA
tggaaggcggtttggatttt

SEQ ID NO: 1544 - RNA, 20 nt, synthetic construct
  source 1..20: mol_type = other RNA
tggagaaggaccaagtacag

SEQ ID NO: 1545 - RNA, 20 nt, synthetic construct
  source 1..20: mol_type = other RNA
tggagttttacggctgtact

SEQ ID NO: 1546 - RNA, 20 nt, synthetic construct
  source 1..20: mol_type = other RNA
tgggacttggtttaggaaaa

SEQ ID NO: 1547 - RNA, 20 nt, synthetic construct
  source 1..20: mol_type = other RNA
tggtaaatttcgtagtcgta

SEQ ID NO: 1548 - RNA, 20 nt, synthetic construct
  source 1..20: mol_type = other RNA
tggtccttctccatcccttt

SEQ ID NO: 1549 - RNA, 20 nt, synthetic construct
  source 1..20: mol_type = other RNA
tggtgtaagatgcatttgta

SEQ ID NO: 1550 - RNA, 20 nt, synthetic construct
  source 1..20: mol_type = other RNA
tggtttaggaaaaggaagca

SEQ ID NO: 1551 - RNA, 20 nt, synthetic construct
  source 1..20: mol_type = other RNA
tgtaagatgcatttgtaaag

SEQ ID NO: 1552 - RNA, 20 nt, synthetic construct
  source 1..20: mol_type = other RNA
tgtacttggtccttctccat

SEQ ID NO: 1553 - RNA, 20 nt, synthetic construct
  source 1..20: mol_type = other RNA
tgtcaagttccgctttgtgc

SEQ ID NO: 1554 - RNA, 20 nt, synthetic construct
  source 1..20: mol_type = other RNA
tgtcaggagaatgaattcat

SEQ ID NO: 1555 - RNA, 20 nt, synthetic construct
  source 1..20: mol_type = other RNA
tgtctgggacttggtttagg

SEQ ID NO: 1556 - RNA, 20 nt, synthetic construct
  source 1..20: mol_type = other RNA
tgtgctgatcctacgactac

SEQ ID NO: 1557 - RNA, 20 nt, synthetic construct
  source 1..20: mol_type = other RNA
tgtggagttttacggctgta

SEQ ID NO: 1558 - RNA, 20 nt, synthetic construct
  source 1..20: mol_type = other RNA
tgtgtcaagttccgctttgt

SEQ ID NO: 1559 - RNA, 20 nt, synthetic construct
  source 1..20: mol_type = other RNA
tgtgtgttttgtggattctt

SEQ ID NO: 1560 - RNA, 20 nt, synthetic construct
  source 1..20: mol_type = other RNA
tgtgttttgtggattctttt

SEQ ID NO: 1561 - RNA, 20 nt, synthetic construct
  source 1..20: mol_type = other RNA
ttaatgccagatgagtttgg

SEQ ID NO: 1562 - RNA, 20 nt, synthetic construct
  source 1..20: mol_type = other RNA
ttacaaatgcatcttacacc

SEQ ID NO: 1563 - RNA, 20 nt, synthetic construct
  source 1..20: mol_type = other RNA
ttacaccaaactcatctggc

SEQ ID NO: 1564 - RNA, 20 nt, synthetic construct
  source 1..20: mol_type = other RNA
ttacggctgtacttggtcct

SEQ ID NO: 1565 - RNA, 20 nt, synthetic construct
  source 1..20: mol_type = other RNA
ttaggaaaaggaagcaaagg

SEQ ID NO: 1566 - RNA, 20 nt, synthetic construct
  source 1..20: mol_type = other RNA
ttatttgtgtgttttgtgga

SEQ ID NO: 1567 - RNA, 20 nt, synthetic construct
  source 1..20: mol_type = other RNA
ttcattctcctgacatgtct

SEQ ID NO: 1568 - RNA, 20 nt, synthetic construct
  source 1..20: mol_type = other RNA
ttcatttttaatgccagatg

SEQ ID NO: 1569 - RNA, 20 nt, synthetic construct
  source 1..20: mol_type = other RNA
ttccgctttgtgctgatcct

SEQ ID NO: 1570 - RNA, 20 nt, synthetic construct
  source 1..20: mol_type = other RNA
ttcctaaaccaagtcccaga

SEQ ID NO: 1571 - RNA, 20 nt, synthetic construct
  source 1..20: mol_type = other RNA
ttccttttcctaaaccaagt

SEQ ID NO: 1572 - RNA, 20 nt, synthetic construct
  source 1..20: mol_type = other RNA
ttcgtagtcgtaggatcagc

SEQ ID NO: 1573 - RNA, 20 nt, synthetic construct
  source 1..20: mol_type = other RNA
ttctccatccctttgcttcc

SEQ ID NO: 1574 - RNA, 20 nt, synthetic construct
  source 1..20: mol_type = other RNA
ttctcctgacatgtctggga

SEQ ID NO: 1575 - RNA, 20 nt, synthetic construct
  source 1..20: mol_type = other RNA
ttgacacacttgtggagttt

SEQ ID NO: 1576 - RNA, 20 nt, synthetic construct
  source 1..20: mol_type = other RNA
ttgcttccttttcctaaacc

SEQ ID NO: 1577 - RNA, 20 nt, synthetic construct
  source 1..20: mol_type = other RNA
ttgctttacaaatgcatctt

SEQ ID NO: 1578 - RNA, 20 nt, synthetic construct
  source 1..20: mol_type = other RNA
ttggaaggcggtttggattt

SEQ ID NO: 1579 - RNA, 20 nt, synthetic construct
  source 1..20: mol_type = other RNA
ttggtaaatttcgtagtcgt

SEQ ID NO: 1580 - RNA, 20 nt, synthetic construct
  source 1..20: mol_type = other RNA
ttggtccttctccatccctt

SEQ ID NO: 1581 - RNA, 20 nt, synthetic construct
  source 1..20: mol_type = other RNA
ttggtgtaagatgcatttgt

SEQ ID NO: 1582 - RNA, 20 nt, synthetic construct
  source 1..20: mol_type = other RNA
ttggtttaggaaaaggaagc

SEQ ID NO: 1583 - RNA, 20 nt, synthetic construct
  source 1..20: mol_type = other RNA
ttgtgctgatcctacgacta

SEQ ID NO: 1584 - RNA, 20 nt, synthetic construct
  source 1..20: mol_type = other RNA
ttgtggagttttacggctgt

SEQ ID NO: 1585 - RNA, 20 nt, synthetic construct
  source 1..20: mol_type = other RNA
ttgtgtgttttgtggattct

SEQ ID NO: 1586 - RNA, 20 nt, synthetic construct
  source 1..20: mol_type = other RNA
tttaatgccagatgagtttg

SEQ ID NO: 1587 - RNA, 20 nt, synthetic construct
  source 1..20: mol_type = other RNA
tttacaaatgcatcttacac

SEQ ID NO: 1588 - RNA, 20 nt, synthetic construct
  source 1..20: mol_type = other RNA
tttacggctgtacttggtcc

SEQ ID NO: 1589 - RNA, 20 nt, synthetic construct
  source 1..20: mol_type = other RNA
tttaggaaaaggaagcaaag

SEQ ID NO: 1590 - RNA, 20 nt, synthetic construct
  source 1..20: mol_type = other RNA
tttatttgtgtgttttgtgg

SEQ ID NO: 1591 - RNA, 20 nt, synthetic construct
  source 1..20: mol_type = other RNA
tttcctaaaccaagtcccag

SEQ ID NO: 1592 - RNA, 20 nt, synthetic construct
  source 1..20: mol_type = other RNA
tttcgtagtcgtaggatcag

SEQ ID NO: 1593 - RNA, 20 nt, synthetic construct
  source 1..20: mol_type = other RNA
tttgcttccttttcctaaac

SEQ ID NO: 1594 - RNA, 20 nt, synthetic construct
  source 1..20: mol_type = other RNA
tttgctttacaaatgcatct

SEQ ID NO: 1595 - RNA, 20 nt, synthetic construct
  source 1..20: mol_type = other RNA
tttggtaaatttcgtagtcg

SEQ ID NO: 1596 - RNA, 20 nt, synthetic construct
  source 1..20: mol_type = other RNA
tttggtgtaagatgcatttg

SEQ ID NO: 1597 - RNA, 20 nt, synthetic construct
  source 1..20: mol_type = other RNA
tttgtgctgatcctacgact

SEQ ID NO: 1598 - RNA, 20 nt, synthetic construct
  source 1..20: mol_type = other RNA
tttgtgtgttttgtggattc

SEQ ID NO: 1599 - RNA, 20 nt, synthetic construct
  source 1..20: mol_type = other RNA
ttttaatgccagatgagttt

SEQ ID NO: 1600 - RNA, 20 nt, synthetic construct
  source 1..20: mol_type = other RNA
ttttacggctgtacttggtc

SEQ ID NO: 1601 - RNA, 20 nt, synthetic construct
  source 1..20: mol_type = other RNA
ttttcctaaaccaagtccca

SEQ ID NO: 1602 - RNA, 20 nt, synthetic construct
  source 1..20: mol_type = other RNA
ttttgctttacaaatgcatc

SEQ ID NO: 1603 - RNA, 20 nt, synthetic construct
  source 1..20: mol_type = other RNA
ttttggtaaatttcgtagtc

SEQ ID NO: 1604 - RNA, 20 nt, synthetic construct
  source 1..20: mol_type = other RNA
tttttaatgccagatgagtt

SEQ ID NO: 1605 - RNA, 21 nt, synthetic construct
  source 1..21: mol_type = other RNA
aaaactccacaagtgtgtcaa

SEQ ID NO: 1606 - RNA, 21 nt, synthetic construct
  source 1..21: mol_type = other RNA
aaaagaatccacaaaacacac

SEQ ID NO: 1607 - RNA, 21 nt, synthetic construct
  source 1..21: mol_type = other RNA
aaaaggaagcaaagggatgga

SEQ ID NO: 1608 - RNA, 21 nt, synthetic construct
  source 1..21: mol_type = other RNA
aaaatccaaaccgccttccaa

SEQ ID NO: 1609 - RNA, 21 nt, synthetic construct
  source 1..21: mol_type = other RNA
aaaccaagtcccagacatgtc

SEQ ID NO: 1610 - RNA, 21 nt, synthetic construct
  source 1..21: mol_type = other RNA
aaaccgccttccaagtggggc

SEQ ID NO: 1611 - RNA, 21 nt, synthetic construct
  source 1..21: mol_type = other RNA
aaactccacaagtgtgtcaag

SEQ ID NO: 1612 - RNA, 21 nt, synthetic construct
  source 1..21: mol_type = other RNA
aaagaatccacaaaacacaca

SEQ ID NO: 1613 - RNA, 21 nt, synthetic construct
  source 1..21: mol_type = other RNA
aaagagccccacttggaaggc

SEQ ID NO: 1614 - RNA, 21 nt, synthetic construct
  source 1..21: mol_type = other RNA
aaagcggaacttgacacactt

SEQ ID NO: 1615 - RNA, 21 nt, synthetic construct
  source 1..21: mol_type = other RNA
aaaggaagcaaagggatggag

SEQ ID NO: 1616 - RNA, 21 nt, synthetic construct
  source 1..21: mol_type = other RNA
aaagggatggagaaggaccaa

SEQ ID NO: 1617 - RNA, 21 nt, synthetic construct
  source 1..21: mol_type = other RNA
aaataaaatccaaaccgcctt

SEQ ID NO: 1618 - RNA, 21 nt, synthetic construct
  source 1..21: mol_type = other RNA
aaatccaaaccgccttccaag

SEQ ID NO: 1619 - RNA, 21 nt, synthetic construct
  source 1..21: mol_type = other RNA
aaatgaattcattctcctgac

SEQ ID NO: 1620 - RNA, 21 nt, synthetic construct
  source 1..21: mol_type = other RNA
aaatgcatcttacaccaaact

SEQ ID NO: 1621 - RNA, 21 nt, synthetic construct
  source 1..21: mol_type = other RNA
aaatttcgtagtcgtaggatc

SEQ ID NO: 1622 - RNA, 21 nt, synthetic construct
  source 1..21: mol_type = other RNA
aaccaagtcccagacatgtca

SEQ ID NO: 1623 - RNA, 21 nt, synthetic construct
  source 1..21: mol_type = other RNA
aaccgccttccaagtggggct

SEQ ID NO: 1624 - RNA, 21 nt, synthetic construct
  source 1..21: mol_type = other RNA
aactccacaagtgtgtcaagt

SEQ ID NO: 1625 - RNA, 21 nt, synthetic construct
  source 1..21: mol_type = other RNA
aacttgacacacttgtggagt

SEQ ID NO: 1626 - RNA, 21 nt, synthetic construct
  source 1..21: mol_type = other RNA
aagaatccacaaaacacacaa

SEQ ID NO: 1627 - RNA, 21 nt, synthetic construct
  source 1..21: mol_type = other RNA
aagagccccacttggaaggcg

SEQ ID NO: 1628 - RNA, 21 nt, synthetic construct
  source 1..21: mol_type = other RNA
aagcaaagggatggagaagga

SEQ ID NO: 1629 - RNA, 21 nt, synthetic construct
  source 1..21: mol_type = other RNA
aagcggaacttgacacacttg

SEQ ID NO: 1630 - RNA, 21 nt, synthetic construct
  source 1..21: mol_type = other RNA
aaggaagcaaagggatggaga

SEQ ID NO: 1631 - RNA, 21 nt, synthetic construct
  source 1..21: mol_type = other RNA
aaggaccaagtacagccgtaa

SEQ ID NO: 1632 - RNA, 21 nt, synthetic construct
  source 1..21: mol_type = other RNA
aaggcggtttggattttattt

SEQ ID NO: 1633 - RNA, 21 nt, synthetic construct
  source 1..21: mol_type = other RNA
aagggatggagaaggaccaag

SEQ ID NO: 1634 - RNA, 21 nt, synthetic construct
  source 1..21: mol_type = other RNA
aagtacagccgtaaaactcca

SEQ ID NO: 1635 - RNA, 21 nt, synthetic construct
  source 1..21: mol_type = other RNA
aagtcccagacatgtcaggag

SEQ ID NO: 1636 - RNA, 21 nt, synthetic construct
  source 1..21: mol_type = other RNA
aagtgtgtcaagttccgcttt

SEQ ID NO: 1637 - RNA, 21 nt, synthetic construct
  source 1..21: mol_type = other RNA
aagttccgctttgtgctgatc

SEQ ID NO: 1638 - RNA, 21 nt, synthetic construct
  source 1..21: mol_type = other RNA
aataaaatccaaaccgccttc

SEQ ID NO: 1639 - RNA, 21 nt, synthetic construct
  source 1..21: mol_type = other RNA
aatccaaaccgccttccaagt

SEQ ID NO: 1640 - RNA, 21 nt, synthetic construct
  source 1..21: mol_type = other RNA
aatgaattcattctcctgaca

SEQ ID NO: 1641 - RNA, 21 nt, synthetic construct
  source 1..21: mol_type = other RNA
aatgcatcttacaccaaactc

SEQ ID NO: 1642 - RNA, 21 nt, synthetic construct
  source 1..21: mol_type = other RNA
aatgccagatgagtttggtgt

SEQ ID NO: 1643 - RNA, 21 nt, synthetic construct
  source 1..21: mol_type = other RNA
aattcattctcctgacatgtc

SEQ ID NO: 1644 - RNA, 21 nt, synthetic construct
  source 1..21: mol_type = other RNA
aatttcgtagtcgtaggatca

SEQ ID NO: 1645 - RNA, 21 nt, synthetic construct
  source 1..21: mol_type = other RNA
acaaagcggaacttgacacac

SEQ ID NO: 1646 - RNA, 21 nt, synthetic construct
  source 1..21: mol_type = other RNA
acaaataaaatccaaaccgcc

SEQ ID NO: 1647 - RNA, 21 nt, synthetic construct
  source 1..21: mol_type = other RNA
acaaatgcatcttacaccaaa

SEQ ID NO: 1648 - RNA, 21 nt, synthetic construct
  source 1..21: mol_type = other RNA
acaagtgtgtcaagttccgct

SEQ ID NO: 1649 - RNA, 21 nt, synthetic construct
  source 1..21: mol_type = other RNA
acacaaataaaatccaaaccg

SEQ ID NO: 1650 - RNA, 21 nt, synthetic construct
  source 1..21: mol_type = other RNA
acacacttgtggagttttacg

SEQ ID NO: 1651 - RNA, 21 nt, synthetic construct
  source 1..21: mol_type = other RNA
acaccaaactcatctggcatt

SEQ ID NO: 1652 - RNA, 21 nt, synthetic construct
  source 1..21: mol_type = other RNA
acacttgtggagttttacggc

SEQ ID NO: 1653 - RNA, 21 nt, synthetic construct
  source 1..21: mol_type = other RNA
acagccgtaaaactccacaag

SEQ ID NO: 1654 - RNA, 21 nt, synthetic construct
  source 1..21: mol_type = other RNA
acatgtcaggagaatgaattc

SEQ ID NO: 1655 - RNA, 21 nt, synthetic construct
  source 1..21: mol_type = other RNA
acatgtctgggacttggttta

SEQ ID NO: 1656 - RNA, 21 nt, synthetic construct
  source 1..21: mol_type = other RNA
accaaactcatctggcattaa

SEQ ID NO: 1657 - RNA, 21 nt, synthetic construct
  source 1..21: mol_type = other RNA
accaagtacagccgtaaaact

SEQ ID NO: 1658 - RNA, 21 nt, synthetic construct
  source 1..21: mol_type = other RNA
accaagtcccagacatgtcag

SEQ ID NO: 1659 - RNA, 21 nt, synthetic construct
  source 1..21: mol_type = other RNA
accgccttccaagtggggctc

SEQ ID NO: 1660 - RNA, 21 nt, synthetic construct
  source 1..21: mol_type = other RNA
acggctgtacttggtccttct

SEQ ID NO: 1661 - RNA, 21 nt, synthetic construct
  source 1..21: mol_type = other RNA
actcatctggcattaaaaatg

SEQ ID NO: 1662 - RNA, 21 nt, synthetic construct
  source 1..21: mol_type = other RNA
actccacaagtgtgtcaagtt

SEQ ID NO: 1663 - RNA, 21 nt, synthetic construct
  source 1..21: mol_type = other RNA
acttgacacacttgtggagtt

SEQ ID NO: 1664 - RNA, 21 nt, synthetic construct
  source 1..21: mol_type = other RNA
acttggaaggcggtttggatt

SEQ ID NO: 1665 - RNA, 21 nt, synthetic construct
  source 1..21: mol_type = other RNA
acttggtccttctccatccct

SEQ ID NO: 1666 - RNA, 21 nt, synthetic construct
  source 1..21: mol_type = other RNA
acttggtttaggaaaaggaag

SEQ ID NO: 1667 - RNA, 21 nt, synthetic construct
  source 1..21: mol_type = other RNA
acttgtggagttttacggctg

SEQ ID NO: 1668 - RNA, 21 nt, synthetic construct
  source 1..21: mol_type = other RNA
agaaggaccaagtacagccgt

SEQ ID NO: 1669 - RNA, 21 nt, synthetic construct
  source 1..21: mol_type = other RNA
agaatccacaaaacacacaaa

SEQ ID NO: 1670 - RNA, 21 nt, synthetic construct
  source 1..21: mol_type = other RNA
agacatgtcaggagaatgaat

SEQ ID NO: 1671 - RNA, 21 nt, synthetic construct
  source 1..21: mol_type = other RNA
agagccccacttggaaggcgg

SEQ ID NO: 1672 - RNA, 21 nt, synthetic construct
  source 1..21: mol_type = other RNA
agatgagtttggtgtaagatg

SEQ ID NO: 1673 - RNA, 21 nt, synthetic construct
  source 1..21: mol_type = other RNA
agcaaagggatggagaaggac

SEQ ID NO: 1674 - RNA, 21 nt, synthetic construct
  source 1..21: mol_type = other RNA
agcacaaagcggaacttgaca

SEQ ID NO: 1675 - RNA, 21 nt, synthetic construct
  source 1..21: mol_type = other RNA
agccccacttggaaggcggtt

SEQ ID NO: 1676 - RNA, 21 nt, synthetic construct
  source 1..21: mol_type = other RNA
agccgtaaaactccacaagtg

SEQ ID NO: 1677 - RNA, 21 nt, synthetic construct
  source 1..21: mol_type = other RNA
agcggaacttgacacacttgt

SEQ ID NO: 1678 - RNA, 21 nt, synthetic construct
  source 1..21: mol_type = other RNA
aggaaaaggaagcaaagggat

SEQ ID NO: 1679 - RNA, 21 nt, synthetic construct
  source 1..21: mol_type = other RNA
aggaagcaaagggatggagaa

SEQ ID NO: 1680 - RNA, 21 nt, synthetic construct
  source 1..21: mol_type = other RNA
aggaccaagtacagccgtaaa

SEQ ID NO: 1681 - RNA, 21 nt, synthetic construct
  source 1..21: mol_type = other RNA
aggatcagcacaaagcggaac

SEQ ID NO: 1682 - RNA, 21 nt, synthetic construct
  source 1..21: mol_type = other RNA
aggcggtttggattttatttg

SEQ ID NO: 1683 - RNA, 21 nt, synthetic construct
  source 1..21: mol_type = other RNA
agggatggagaaggaccaagt

SEQ ID NO: 1684 - RNA, 21 nt, synthetic construct
  source 1..21: mol_type = other RNA
agtacagccgtaaaactccac

SEQ ID NO: 1685 - RNA, 21 nt, synthetic construct
  source 1..21: mol_type = other RNA
agtcccagacatgtcaggaga

SEQ ID NO: 1686 - RNA, 21 nt, synthetic construct
  source 1..21: mol_type = other RNA
agtcgtaggatcagcacaaag

SEQ ID NO: 1687 - RNA, 21 nt, synthetic construct
  source 1..21: mol_type = other RNA
agtgtgtcaagttccgctttg

SEQ ID NO: 1688 - RNA, 21 nt, synthetic construct
  source 1..21: mol_type = other RNA
agttccgctttgtgctgatcc

SEQ ID NO: 1689 - RNA, 21 nt, synthetic construct
  source 1..21: mol_type = other RNA
agtttggtgtaagatgcattt

SEQ ID NO: 1690 - RNA, 21 nt, synthetic construct
  source 1..21: mol_type = other RNA
agttttacggctgtacttggt

SEQ ID NO: 1691 - RNA, 21 nt, synthetic construct
  source 1..21: mol_type = other RNA
ataaaatccaaaccgccttcc

SEQ ID NO: 1692 - RNA, 21 nt, synthetic construct
  source 1..21: mol_type = other RNA
atcagcacaaagcggaacttg

SEQ ID NO: 1693 - RNA, 21 nt, synthetic construct
  source 1..21: mol_type = other RNA
atccaaaccgccttccaagtg

SEQ ID NO: 1694 - RNA, 21 nt, synthetic construct
  source 1..21: mol_type = other RNA
atccctttgcttccttttcct

SEQ ID NO: 1695 - RNA, 21 nt, synthetic construct
  source 1..21: mol_type = other RNA
atcttacaccaaactcatctg

SEQ ID NO: 1696 - RNA, 21 nt, synthetic construct
  source 1..21: mol_type = other RNA
atgaaagagccccacttggaa

SEQ ID NO: 1697 - RNA, 21 nt, synthetic construct
  source 1..21: mol_type = other RNA
atgaattcattctcctgacat

SEQ ID NO: 1698 - RNA, 21 nt, synthetic construct
  source 1..21: mol_type = other RNA
atgagtttggtgtaagatgca

SEQ ID NO: 1699 - RNA, 21 nt, synthetic construct
  source 1..21: mol_type = other RNA
atgcatcttacaccaaactca

SEQ ID NO: 1700 - RNA, 21 nt, synthetic construct
  source 1..21: mol_type = other RNA
atgccagatgagtttggtgta

SEQ ID NO: 1701 - RNA, 21 nt, synthetic construct
  source 1..21: mol_type = other RNA
atggagaaggaccaagtacag

SEQ ID NO: 1702 - RNA, 21 nt, synthetic construct
  source 1..21: mol_type = other RNA
atgtcaggagaatgaattcat

SEQ ID NO: 1703 - RNA, 21 nt, synthetic construct
  source 1..21: mol_type = other RNA
atgtctgggacttggtttagg

SEQ ID NO: 1704 - RNA, 21 nt, synthetic construct
  source 1..21: mol_type = other RNA
attcattctcctgacatgtct

SEQ ID NO: 1705 - RNA, 21 nt, synthetic construct
  source 1..21: mol_type = other RNA
attctcctgacatgtctggga

SEQ ID NO: 1706 - RNA, 21 nt, synthetic construct
  source 1..21: mol_type = other RNA
atttcgtagtcgtaggatcag

SEQ ID NO: 1707 - RNA, 21 nt, synthetic construct
  source 1..21: mol_type = other RNA
atttgtgtgttttgtggattc

SEQ ID NO: 1708 - RNA, 21 nt, synthetic construct
  source 1..21: mol_type = other RNA
caaaccgccttccaagtgggg

SEQ ID NO: 1709 - RNA, 21 nt, synthetic construct
  source 1..21: mol_type = other RNA
caaactcatctggcattaaaa

SEQ ID NO: 1710 - RNA, 21 nt, synthetic construct
  source 1..21: mol_type = other RNA
caaagcggaacttgacacact

SEQ ID NO: 1711 - RNA, 21 nt, synthetic construct
  source 1..21: mol_type = other RNA
caaagggatggagaaggacca

SEQ ID NO: 1712 - RNA, 21 nt, synthetic construct
  source 1..21: mol_type = other RNA
caaataaaatccaaaccgcct

SEQ ID NO: 1713 - RNA, 21 nt, synthetic construct
  source 1..21: mol_type = other RNA
caaatgcatcttacaccaaac

SEQ ID NO: 1714 - RNA, 21 nt, synthetic construct
  source 1..21: mol_type = other RNA
caagtacagccgtaaaactcc

SEQ ID NO: 1715 - RNA, 21 nt, synthetic construct
  source 1..21: mol_type = other RNA
caagtcccagacatgtcagga

SEQ ID NO: 1716 - RNA, 21 nt, synthetic construct
  source 1..21: mol_type = other RNA
caagtgtgtcaagttccgctt

SEQ ID NO: 1717 - RNA, 21 nt, synthetic construct
  source 1..21: mol_type = other RNA
caagttccgctttgtgctgat

SEQ ID NO: 1718 - RNA, 21 nt, synthetic construct
  source 1..21: mol_type = other RNA
cacaaagcggaacttgacaca

SEQ ID NO: 1719 - RNA, 21 nt, synthetic construct
  source 1..21: mol_type = other RNA
cacaaataaaatccaaaccgc

SEQ ID NO: 1720 - RNA, 21 nt, synthetic construct
  source 1..21: mol_type = other RNA
cacaagtgtgtcaagttccgc

SEQ ID NO: 1721 - RNA, 21 nt, synthetic construct
  source 1..21: mol_type = other RNA
cacacaaataaaatccaaacc

SEQ ID NO: 1722 - RNA, 21 nt, synthetic construct
  source 1..21: mol_type = other RNA
cacacttgtggagttttacgg

SEQ ID NO: 1723 - RNA, 21 nt, synthetic construct
  source 1..21: mol_type = other RNA
caccaaactcatctggcatta

SEQ ID NO: 1724 - RNA, 21 nt, synthetic construct
  source 1..21: mol_type = other RNA
cacttggaaggcggtttggat

SEQ ID NO: 1725 - RNA, 21 nt, synthetic construct
  source 1..21: mol_type = other RNA
cacttgtggagttttacggct

SEQ ID NO: 1726 - RNA, 21 nt, synthetic construct
  source 1..21: mol_type = other RNA
cagacatgtcaggagaatgaa

SEQ ID NO: 1727 - RNA, 21 nt, synthetic construct
  source 1..21: mol_type = other RNA
cagatgagtttggtgtaagat

SEQ ID NO: 1728 - RNA, 21 nt, synthetic construct
  source 1..21: mol_type = other RNA
cagcacaaagcggaacttgac

SEQ ID NO: 1729 - RNA, 21 nt, synthetic construct
  source 1..21: mol_type = other RNA
cagccgtaaaactccacaagt

SEQ ID NO: 1730 - RNA, 21 nt, synthetic construct
  source 1..21: mol_type = other RNA
catccctttgcttccttttcc

SEQ ID NO: 1731 - RNA, 21 nt, synthetic construct
  source 1..21: mol_type = other RNA
catcttacaccaaactcatct

SEQ ID NO: 1732 - RNA, 21 nt, synthetic construct
  source 1..21: mol_type = other RNA
catgaaagagccccacttgga

SEQ ID NO: 1733 - RNA, 21 nt, synthetic construct
  source 1..21: mol_type = other RNA
catgtcaggagaatgaattca

SEQ ID NO: 1734 - RNA, 21 nt, synthetic construct
  source 1..21: mol_type = other RNA
catgtctgggacttggtttag

SEQ ID NO: 1735 - RNA, 21 nt, synthetic construct
  source 1..21: mol_type = other RNA
cattctcctgacatgtctggg

SEQ ID NO: 1736 - RNA, 21 nt, synthetic construct
  source 1..21: mol_type = other RNA
catttttaatgccagatgagt

SEQ ID NO: 1737 - RNA, 21 nt, synthetic construct
  source 1..21: mol_type = other RNA
ccaaaccgccttccaagtggg

SEQ ID NO: 1738 - RNA, 21 nt, synthetic construct
  source 1..21: mol_type = other RNA
ccaaactcatctggcattaaa

SEQ ID NO: 1739 - RNA, 21 nt, synthetic construct
  source 1..21: mol_type = other RNA
ccaagtacagccgtaaaactc

SEQ ID NO: 1740 - RNA, 21 nt, synthetic construct
  source 1..21: mol_type = other RNA
ccaagtcccagacatgtcagg

SEQ ID NO: 1741 - RNA, 21 nt, synthetic construct
  source 1..21: mol_type = other RNA
ccacaagtgtgtcaagttccg

SEQ ID NO: 1742 - RNA, 21 nt, synthetic construct
  source 1..21: mol_type = other RNA
ccacttggaaggcggtttgga

SEQ ID NO: 1743 - RNA, 21 nt, synthetic construct
  source 1..21: mol_type = other RNA
ccagacatgtcaggagaatga

SEQ ID NO: 1744 - RNA, 21 nt, synthetic construct
  source 1..21: mol_type = other RNA
ccagatgagtttggtgtaaga

SEQ ID NO: 1745 - RNA, 21 nt, synthetic construct
  source 1..21: mol_type = other RNA
ccatccctttgcttccttttc

SEQ ID NO: 1746 - RNA, 21 nt, synthetic construct
  source 1..21: mol_type = other RNA
cccacttggaaggcggtttgg

SEQ ID NO: 1747 - RNA, 21 nt, synthetic construct
  source 1..21: mol_type = other RNA
cccagacatgtcaggagaatg

SEQ ID NO: 1748 - RNA, 21 nt, synthetic construct
  source 1..21: mol_type = other RNA
ccccacttggaaggcggtttg

SEQ ID NO: 1749 - RNA, 21 nt, synthetic construct
  source 1..21: mol_type = other RNA
ccctttgcttccttttcctaa

SEQ ID NO: 1750 - RNA, 21 nt, synthetic construct
  source 1..21: mol_type = other RNA
ccgctttgtgctgatcctacg

SEQ ID NO: 1751 - RNA, 21 nt, synthetic construct
  source 1..21: mol_type = other RNA
ccgtaaaactccacaagtgtg

SEQ ID NO: 1752 - RNA, 21 nt, synthetic construct
  source 1..21: mol_type = other RNA
cctaaaccaagtcccagacat

SEQ ID NO: 1753 - RNA, 21 nt, synthetic construct
  source 1..21: mol_type = other RNA
cctgacatgtctgggacttgg

SEQ ID NO: 1754 - RNA, 21 nt, synthetic construct
  source 1..21: mol_type = other RNA
ccttctccatccctttgcttc

SEQ ID NO: 1755 - RNA, 21 nt, synthetic construct
  source 1..21: mol_type = other RNA
cctttgcttccttttcctaaa

SEQ ID NO: 1756 - RNA, 21 nt, synthetic construct
  source 1..21: mol_type = other RNA
ccttttcctaaaccaagtccc

SEQ ID NO: 1757 - RNA, 21 nt, synthetic construct
  source 1..21: mol_type = other RNA
cgctttgtgctgatcctacga

SEQ ID NO: 1758 - RNA, 21 nt, synthetic construct
  source 1..21: mol_type = other RNA
cggaacttgacacacttgtgg

SEQ ID NO: 1759 - RNA, 21 nt, synthetic construct
  source 1..21: mol_type = other RNA
cggctgtacttggtccttctc

SEQ ID NO: 1760 - RNA, 21 nt, synthetic construct
  source 1..21: mol_type = other RNA
cggtttggattttatttgtgt

SEQ ID NO: 1761 - RNA, 21 nt, synthetic construct
  source 1..21: mol_type = other RNA
cgtaaaactccacaagtgtgt

SEQ ID NO: 1762 - RNA, 21 nt, synthetic construct
  source 1..21: mol_type = other RNA
cgtaggatcagcacaaagcgg

SEQ ID NO: 1763 - RNA, 21 nt, synthetic construct
  source 1..21: mol_type = other RNA
cgtagtcgtaggatcagcaca

SEQ ID NO: 1764 - RNA, 21 nt, synthetic construct
  source 1..21: mol_type = other RNA
ctaaaccaagtcccagacatg

SEQ ID NO: 1765 - RNA, 21 nt, synthetic construct
  source 1..21: mol_type = other RNA
ctcatctggcattaaaaatga

SEQ ID NO: 1766 - RNA, 21 nt, synthetic construct
  source 1..21: mol_type = other RNA
ctccacaagtgtgtcaagttc

SEQ ID NO: 1767 - RNA, 21 nt, synthetic construct
  source 1..21: mol_type = other RNA
ctccatccctttgcttccttt

SEQ ID NO: 1768 - RNA, 21 nt, synthetic construct
  source 1..21: mol_type = other RNA
ctcctgacatgtctgggactt

SEQ ID NO: 1769 - RNA, 21 nt, synthetic construct
  source 1..21: mol_type = other RNA
ctgacatgtctgggacttggt

SEQ ID NO: 1770 - RNA, 21 nt, synthetic construct
  source 1..21: mol_type = other RNA
ctgatcctacgactacgaaat

SEQ ID NO: 1771 - RNA, 21 nt, synthetic construct
  source 1..21: mol_type = other RNA
ctgggacttggtttaggaaaa

SEQ ID NO: 1772 - RNA, 21 nt, synthetic construct
  source 1..21: mol_type = other RNA
ctgtacttggtccttctccat

SEQ ID NO: 1773 - RNA, 21 nt, synthetic construct
  source 1..21: mol_type = other RNA
cttacaccaaactcatctggc

SEQ ID NO: 1774 - RNA, 21 nt, synthetic construct
  source 1..21: mol_type = other RNA
cttccttttcctaaaccaagt

SEQ ID NO: 1775 - RNA, 21 nt, synthetic construct
  source 1..21: mol_type = other RNA
cttctccatccctttgcttcc

SEQ ID NO: 1776 - RNA, 21 nt, synthetic construct
  source 1..21: mol_type = other RNA
cttgacacacttgtggagttt

SEQ ID NO: 1777 - RNA, 21 nt, synthetic construct
  source 1..21: mol_type = other RNA
cttggaaggcggtttggattt

SEQ ID NO: 1778 - RNA, 21 nt, synthetic construct
  source 1..21: mol_type = other RNA
cttggtccttctccatccctt

SEQ ID NO: 1779 - RNA, 21 nt, synthetic construct
  source 1..21: mol_type = other RNA
cttggtttaggaaaaggaagc

SEQ ID NO: 1780 - RNA, 21 nt, synthetic construct
  source 1..21: mol_type = other RNA
cttgtggagttttacggctgt

SEQ ID NO: 1781 - RNA, 21 nt, synthetic construct
  source 1..21: mol_type = other RNA
ctttacaaatgcatcttacac

SEQ ID NO: 1782 - RNA, 21 nt, synthetic construct
  source 1..21: mol_type = other RNA
ctttgcttccttttcctaaac

SEQ ID NO: 1783 - RNA, 21 nt, synthetic construct
  source 1..21: mol_type = other RNA
ctttgtgctgatcctacgact

SEQ ID NO: 1784 - RNA, 21 nt, synthetic construct
  source 1..21: mol_type = other RNA
cttttcctaaaccaagtccca

SEQ ID NO: 1785 - RNA, 21 nt, synthetic construct
  source 1..21: mol_type = other RNA
gaaaaggaagcaaagggatgg

SEQ ID NO: 1786 - RNA, 21 nt, synthetic construct
  source 1..21: mol_type = other RNA
gaaagagccccacttggaagg

SEQ ID NO: 1787 - RNA, 21 nt, synthetic construct
  source 1..21: mol_type = other RNA
gaacttgacacacttgtggag

SEQ ID NO: 1788 - RNA, 21 nt, synthetic construct
  source 1..21: mol_type = other RNA
gaagcaaagggatggagaagg

SEQ ID NO: 1789 - RNA, 21 nt, synthetic construct
  source 1..21: mol_type = other RNA
gaaggaccaagtacagccgta

SEQ ID NO: 1790 - RNA, 21 nt, synthetic construct
  source 1..21: mol_type = other RNA
gaaggcggtttggattttatt

SEQ ID NO: 1791 - RNA, 21 nt, synthetic construct
  source 1..21: mol_type = other RNA
gaatccacaaaacacacaaat

SEQ ID NO: 1792 - RNA, 21 nt, synthetic construct
  source 1..21: mol_type = other RNA
gaattcattctcctgacatgt

SEQ ID NO: 1793 - RNA, 21 nt, synthetic construct
  source 1..21: mol_type = other RNA
gacacacttgtggagttttac

SEQ ID NO: 1794 - RNA, 21 nt, synthetic construct
  source 1..21: mol_type = other RNA
gacatgtcaggagaatgaatt

SEQ ID NO: 1795 - RNA, 21 nt, synthetic construct
  source 1..21: mol_type = other RNA
gacatgtctgggacttggttt

SEQ ID NO: 1796 - RNA, 21 nt, synthetic construct
  source 1..21: mol_type = other RNA
gaccaagtacagccgtaaaac

SEQ ID NO: 1797 - RNA, 21 nt, synthetic construct
  source 1..21: mol_type = other RNA
gacttggtttaggaaaaggaa

SEQ ID NO: 1798 - RNA, 21 nt, synthetic construct
  source 1..21: mol_type = other RNA
gagaaggaccaagtacagccg

SEQ ID NO: 1799 - RNA, 21 nt, synthetic construct
  source 1..21: mol_type = other RNA
gagccccacttggaaggcggt

SEQ ID NO: 1800 - RNA, 21 nt, synthetic construct
  source 1..21: mol_type = other RNA
gagtttggtgtaagatgcatt

SEQ ID NO: 1801 - RNA, 21 nt, synthetic construct
  source 1..21: mol_type = other RNA
gagttttacggctgtacttgg

SEQ ID NO: 1802 - RNA, 21 nt, synthetic construct
  source 1..21: mol_type = other RNA
gatcagcacaaagcggaactt

SEQ ID NO: 1803 - RNA, 21 nt, synthetic construct
  source 1..21: mol_type = other RNA
gatgagtttggtgtaagatgc

SEQ ID NO: 1804 - RNA, 21 nt, synthetic construct
  source 1..21: mol_type = other RNA
gatggagaaggaccaagtaca

SEQ ID NO: 1805 - RNA, 21 nt, synthetic construct
  source 1..21: mol_type = other RNA
gcaaagggatggagaaggacc

SEQ ID NO: 1806 - RNA, 21 nt, synthetic construct
  source 1..21: mol_type = other RNA
gcacaaagcggaacttgacac

SEQ ID NO: 1807 - RNA, 21 nt, synthetic construct
  source 1..21: mol_type = other RNA
gcatcttacaccaaactcatc

SEQ ID NO: 1808 - RNA, 21 nt, synthetic construct
  source 1..21: mol_type = other RNA
gcatgaaagagccccacttgg

SEQ ID NO: 1809 - RNA, 21 nt, synthetic construct
  source 1..21: mol_type = other RNA
gccagatgagtttggtgtaag

SEQ ID NO: 1810 - RNA, 21 nt, synthetic construct
  source 1..21: mol_type = other RNA
gccccacttggaaggcggttt

SEQ ID NO: 1811 - RNA, 21 nt, synthetic construct
  source 1..21: mol_type = other RNA
gccgtaaaactccacaagtgt

SEQ ID NO: 1812 - RNA, 21 nt, synthetic construct
  source 1..21: mol_type = other RNA
gcggaacttgacacacttgtg

SEQ ID NO: 1813 - RNA, 21 nt, synthetic construct
  source 1..21: mol_type = other RNA
gcggtttggattttatttgtg

SEQ ID NO: 1814 - RNA, 21 nt, synthetic construct
  source 1..21: mol_type = other RNA
gctgatcctacgactacgaaa

SEQ ID NO: 1815 - RNA, 21 nt, synthetic construct
  source 1..21: mol_type = other RNA
gctgtacttggtccttctcca

SEQ ID NO: 1816 - RNA, 21 nt, synthetic construct
  source 1..21: mol_type = other RNA
gcttccttttcctaaaccaag

SEQ ID NO: 1817 - RNA, 21 nt, synthetic construct
  source 1..21: mol_type = other RNA
gctttacaaatgcatcttaca

SEQ ID NO: 1818 - RNA, 21 nt, synthetic construct
  source 1..21: mol_type = other RNA
gctttgtgctgatcctacgac

SEQ ID NO: 1819 - RNA, 21 nt, synthetic construct
  source 1..21: mol_type = other RNA
ggaaaaggaagcaaagggatg

SEQ ID NO: 1820 - RNA, 21 nt, synthetic construct
  source 1..21: mol_type = other RNA
ggaacttgacacacttgtgga

SEQ ID NO: 1821 - RNA, 21 nt, synthetic construct
  source 1..21: mol_type = other RNA
ggaagcaaagggatggagaag

SEQ ID NO: 1822 - RNA, 21 nt, synthetic construct
  source 1..21: mol_type = other RNA
ggaaggcggtttggattttat

SEQ ID NO: 1823 - RNA, 21 nt, synthetic construct
  source 1..21: mol_type = other RNA
ggaccaagtacagccgtaaaa

SEQ ID NO: 1824 - RNA, 21 nt, synthetic construct
  source 1..21: mol_type = other RNA
ggacttggtttaggaaaagga

SEQ ID NO: 1825 - RNA, 21 nt, synthetic construct
  source 1..21: mol_type = other RNA
ggagaaggaccaagtacagcc

SEQ ID NO: 1826 - RNA, 21 nt, synthetic construct
  source 1..21: mol_type = other RNA
ggagttttacggctgtacttg

SEQ ID NO: 1827 - RNA, 21 nt, synthetic construct
  source 1..21: mol_type = other RNA
ggatcagcacaaagcggaact

SEQ ID NO: 1828 - RNA, 21 nt, synthetic construct
  source 1..21: mol_type = other RNA
ggatggagaaggaccaagtac

SEQ ID NO: 1829 - RNA, 21 nt, synthetic construct
  source 1..21: mol_type = other RNA
ggcggtttggattttatttgt

SEQ ID NO: 1830 - RNA, 21 nt, synthetic construct
  source 1..21: mol_type = other RNA
ggctgtacttggtccttctcc

SEQ ID NO: 1831 - RNA, 21 nt, synthetic construct
  source 1..21: mol_type = other RNA
gggacttggtttaggaaaagg

SEQ ID NO: 1832 - RNA, 21 nt, synthetic construct
  source 1..21: mol_type = other RNA
gggatggagaaggaccaagta

SEQ ID NO: 1833 - RNA, 21 nt, synthetic construct
  source 1..21: mol_type = other RNA
ggtaaatttcgtagtcgtagg

SEQ ID NO: 1834 - RNA, 21 nt, synthetic construct
  source 1..21: mol_type = other RNA
ggtccttctccatccctttgc

SEQ ID NO: 1835 - RNA, 21 nt, synthetic construct
  source 1..21: mol_type = other RNA
ggtgtaagatgcatttgtaaa

SEQ ID NO: 1836 - RNA, 21 nt, synthetic construct
  source 1..21: mol_type = other RNA
ggtttaggaaaaggaagcaaa

SEQ ID NO: 1837 - RNA, 21 nt, synthetic construct
  source 1..21: mol_type = other RNA
ggtttggattttatttgtgtg

SEQ ID NO: 1838 - RNA, 21 nt, synthetic construct
  source 1..21: mol_type = other RNA
gtaaaactccacaagtgtgtc

SEQ ID NO: 1839 - RNA, 21 nt, synthetic construct
  source 1..21: mol_type = other RNA
gtaaatttcgtagtcgtagga

SEQ ID NO: 1840 - RNA, 21 nt, synthetic construct
  source 1..21: mol_type = other RNA
gtaagatgcatttgtaaagca

SEQ ID NO: 1841 - RNA, 21 nt, synthetic construct
  source 1..21: mol_type = other RNA
gtacagccgtaaaactccaca

SEQ ID NO: 1842 - RNA, 21 nt, synthetic construct
  source 1..21: mol_type = other RNA
gtacttggtccttctccatcc

SEQ ID NO: 1843 - RNA, 21 nt, synthetic construct
  source 1..21: mol_type = other RNA
gtaggatcagcacaaagcgga

SEQ ID NO: 1844 - RNA, 21 nt, synthetic construct
  source 1..21: mol_type = other RNA
gtagtcgtaggatcagcacaa

SEQ ID NO: 1845 - RNA, 21 nt, synthetic construct
  source 1..21: mol_type = other RNA
gtcaagttccgctttgtgctg

SEQ ID NO: 1846 - RNA, 21 nt, synthetic construct
  source 1..21: mol_type = other RNA
gtcaggagaatgaattcattt

SEQ ID NO: 1847 - RNA, 21 nt, synthetic construct
  source 1..21: mol_type = other RNA
gtcccagacatgtcaggagaa

SEQ ID NO: 1848 - RNA, 21 nt, synthetic construct
  source 1..21: mol_type = other RNA
gtccttctccatccctttgct

SEQ ID NO: 1849 - RNA, 21 nt, synthetic construct
  source 1..21: mol_type = other RNA
gtcgtaggatcagcacaaagc

SEQ ID NO: 1850 - RNA, 21 nt, synthetic construct
  source 1..21: mol_type = other RNA
gtctgggacttggtttaggaa

SEQ ID NO: 1851 - RNA, 21 nt, synthetic construct
  source 1..21: mol_type = other RNA
gtgctgatcctacgactacga

SEQ ID NO: 1852 - RNA, 21 nt, synthetic construct
  source 1..21: mol_type = other RNA
gtggagttttacggctgtact

SEQ ID NO: 1853 - RNA, 21 nt, synthetic construct
  source 1..21: mol_type = other RNA
gtgtaagatgcatttgtaaag

SEQ ID NO: 1854 - RNA, 21 nt, synthetic construct
  source 1..21: mol_type = other RNA
gtgtcaagttccgctttgtgc

SEQ ID NO: 1855 - RNA, 21 nt, synthetic construct
  source 1..21: mol_type = other RNA
gtgtgtcaagttccgctttgt

SEQ ID NO: 1856 - RNA, 21 nt, synthetic construct
  source 1..21: mol_type = other RNA
gtgtgttttgtggattctttt

SEQ ID NO: 1857 - RNA, 21 nt, synthetic construct
  source 1..21: mol_type = other RNA
gttccgctttgtgctgatcct

SEQ ID NO: 1858 - RNA, 21 nt, synthetic construct
  source 1..21: mol_type = other RNA
gtttaggaaaaggaagcaaag

SEQ ID NO: 1859 - RNA, 21 nt, synthetic construct
  source 1..21: mol_type = other RNA
gtttggtgtaagatgcatttg

SEQ ID NO: 1860 - RNA, 21 nt, synthetic construct
  source 1..21: mol_type = other RNA
gttttacggctgtacttggtc

SEQ ID NO: 1861 - RNA, 21 nt, synthetic construct
  source 1..21: mol_type = other RNA
taaaactccacaagtgtgtca

SEQ ID NO: 1862 - RNA, 21 nt, synthetic construct
  source 1..21: mol_type = other RNA
taaaatccaaaccgccttcca

SEQ ID NO: 1863 - RNA, 21 nt, synthetic construct
  source 1..21: mol_type = other RNA
taaaccaagtcccagacatgt

SEQ ID NO: 1864 - RNA, 21 nt, synthetic construct
  source 1..21: mol_type = other RNA
taaatttcgtagtcgtaggat

SEQ ID NO: 1865 - RNA, 21 nt, synthetic construct
  source 1..21: mol_type = other RNA
taatgccagatgagtttggtg

SEQ ID NO: 1866 - RNA, 21 nt, synthetic construct
  source 1..21: mol_type = other RNA
tacaaatgcatcttacaccaa

SEQ ID NO: 1867 - RNA, 21 nt, synthetic construct
  source 1..21: mol_type = other RNA
tacaccaaactcatctggcat

SEQ ID NO: 1868 - RNA, 21 nt, synthetic construct
  source 1..21: mol_type = other RNA
tacagccgtaaaactccacaa

SEQ ID NO: 1869 - RNA, 21 nt, synthetic construct
  source 1..21: mol_type = other RNA
tacggctgtacttggtccttc

SEQ ID NO: 1870 - RNA, 21 nt, synthetic construct
  source 1..21: mol_type = other RNA
tacttggtccttctccatccc

SEQ ID NO: 1871 - RNA, 21 nt, synthetic construct
  source 1..21: mol_type = other RNA
taggaaaaggaagcaaaggga

SEQ ID NO: 1872 - RNA, 21 nt, synthetic construct
  source 1..21: mol_type = other RNA
taggatcagcacaaagcggaa

SEQ ID NO: 1873 - RNA, 21 nt, synthetic construct
  source 1..21: mol_type = other RNA
tagtcgtaggatcagcacaaa

SEQ ID NO: 1874 - RNA, 21 nt, synthetic construct
  source 1..21: mol_type = other RNA
tcaagttccgctttgtgctga

SEQ ID NO: 1875 - RNA, 21 nt, synthetic construct
  source 1..21: mol_type = other RNA
tcagcacaaagcggaacttga

SEQ ID NO: 1876 - RNA, 21 nt, synthetic construct
  source 1..21: mol_type = other RNA
tcattctcctgacatgtctgg

SEQ ID NO: 1877 - RNA, 21 nt, synthetic construct
  source 1..21: mol_type = other RNA
tcatttttaatgccagatgag

SEQ ID NO: 1878 - RNA, 21 nt, synthetic construct
  source 1..21: mol_type = other RNA
tccaaaccgccttccaagtgg

SEQ ID NO: 1879 - RNA, 21 nt, synthetic construct
  source 1..21: mol_type = other RNA
tccacaagtgtgtcaagttcc

SEQ ID NO: 1880 - RNA, 21 nt, synthetic construct
  source 1..21: mol_type = other RNA
tccatccctttgcttcctttt

SEQ ID NO: 1881 - RNA, 21 nt, synthetic construct
  source 1..21: mol_type = other RNA
tcccagacatgtcaggagaat

SEQ ID NO: 1882 - RNA, 21 nt, synthetic construct
  source 1..21: mol_type = other RNA
tccctttgcttccttttccta

SEQ ID NO: 1883 - RNA, 21 nt, synthetic construct
  source 1..21: mol_type = other RNA
tccgctttgtgctgatcctac

SEQ ID NO: 1884 - RNA, 21 nt, synthetic construct
  source 1..21: mol_type = other RNA
tcctaaaccaagtcccagaca

SEQ ID NO: 1885 - RNA, 21 nt, synthetic construct
  source 1..21: mol_type = other RNA
tcctgacatgtctgggacttg

SEQ ID NO: 1886 - RNA, 21 nt, synthetic construct
  source 1..21: mol_type = other RNA
tccttctccatccctttgctt

SEQ ID NO: 1887 - RNA, 21 nt, synthetic construct
  source 1..21: mol_type = other RNA
tccttttcctaaaccaagtcc

SEQ ID NO: 1888 - RNA, 21 nt, synthetic construct
  source 1..21: mol_type = other RNA
tcgtaggatcagcacaaagcg

SEQ ID NO: 1889 - RNA, 21 nt, synthetic construct
  source 1..21: mol_type = other RNA
tcgtagtcgtaggatcagcac

SEQ ID NO: 1890 - RNA, 21 nt, synthetic construct
  source 1..21: mol_type = other RNA
tctccatccctttgcttcctt

SEQ ID NO: 1891 - RNA, 21 nt, synthetic construct
  source 1..21: mol_type = other RNA
tctcctgacatgtctgggact

SEQ ID NO: 1892 - RNA, 21 nt, synthetic construct
  source 1..21: mol_type = other RNA
tctgggacttggtttaggaaa

SEQ ID NO: 1893 - RNA, 21 nt, synthetic construct
  source 1..21: mol_type = other RNA
tcttacaccaaactcatctgg

SEQ ID NO: 1894 - RNA, 21 nt, synthetic construct
  source 1..21: mol_type = other RNA
tgaaagagccccacttggaag

SEQ ID NO: 1895 - RNA, 21 nt, synthetic construct
  source 1..21: mol_type = other RNA
tgaattcattctcctgacatg

SEQ ID NO: 1896 - RNA, 21 nt, synthetic construct
  source 1..21: mol_type = other RNA
tgacacacttgtggagtttta

SEQ ID NO: 1897 - RNA, 21 nt, synthetic construct
  source 1..21: mol_type = other RNA
tgacatgtctgggacttggtt

SEQ ID NO: 1898 - RNA, 21 nt, synthetic construct
  source 1..21: mol_type = other RNA
tgagtttggtgtaagatgcat

SEQ ID NO: 1899 - RNA, 21 nt, synthetic construct
  source 1..21: mol_type = other RNA
tgatcctacgactacgaaatt

SEQ ID NO: 1900 - RNA, 21 nt, synthetic construct
  source 1..21: mol_type = other RNA
tgcatcttacaccaaactcat

SEQ ID NO: 1901 - RNA, 21 nt, synthetic construct
  source 1..21: mol_type = other RNA
tgccagatgagtttggtgtaa

SEQ ID NO: 1902 - RNA, 21 nt, synthetic construct
  source 1..21: mol_type = other RNA
tgctgatcctacgactacgaa

SEQ ID NO: 1903 - RNA, 21 nt, synthetic construct
  source 1..21: mol_type = other RNA
tgcttccttttcctaaaccaa

SEQ ID NO: 1904 - RNA, 21 nt, synthetic construct
  source 1..21: mol_type = other RNA
tgctttacaaatgcatcttac

SEQ ID NO: 1905 - RNA, 21 nt, synthetic construct
  source 1..21: mol_type = other RNA
tggaaggcggtttggatttta

SEQ ID NO: 1906 - RNA, 21 nt, synthetic construct
  source 1..21: mol_type = other RNA
tggagaaggaccaagtacagc

SEQ ID NO: 1907 - RNA, 21 nt, synthetic construct
  source 1..21: mol_type = other RNA
tggagttttacggctgtactt

SEQ ID NO: 1908 - RNA, 21 nt, synthetic construct
  source 1..21: mol_type = other RNA
tgggacttggtttaggaaaag

SEQ ID NO: 1909 - RNA, 21 nt, synthetic construct
  source 1..21: mol_type = other RNA
tggtaaatttcgtagtcgtag

SEQ ID NO: 1910 - RNA, 21 nt, synthetic construct
  source 1..21: mol_type = other RNA
tggtccttctccatccctttg

SEQ ID NO: 1911 - RNA, 21 nt, synthetic construct
  source 1..21: mol_type = other RNA
tggtgtaagatgcatttgtaa

SEQ ID NO: 1912 - RNA, 21 nt, synthetic construct
  source 1..21: mol_type = other RNA
tggtttaggaaaaggaagcaa

SEQ ID NO: 1913 - RNA, 21 nt, synthetic construct
  source 1..21: mol_type = other RNA
tgtaagatgcatttgtaaagc

SEQ ID NO: 1914 - RNA, 21 nt, synthetic construct
  source 1..21: mol_type = other RNA
tgtacttggtccttctccatc

SEQ ID NO: 1915 - RNA, 21 nt, synthetic construct
  source 1..21: mol_type = other RNA
tgtcaagttccgctttgtgct

SEQ ID NO: 1916 - RNA, 21 nt, synthetic construct
  source 1..21: mol_type = other RNA
tgtcaggagaatgaattcatt

SEQ ID NO: 1917 - RNA, 21 nt, synthetic construct
  source 1..21: mol_type = other RNA
tgtctgggacttggtttagga

SEQ ID NO: 1918 - RNA, 21 nt, synthetic construct
  source 1..21: mol_type = other RNA
tgtgctgatcctacgactacg

SEQ ID NO: 1919 - RNA, 21 nt, synthetic construct
  source 1..21: mol_type = other RNA
tgtggagttttacggctgtac

SEQ ID NO: 1920 - RNA, 21 nt, synthetic construct
  source 1..21: mol_type = other RNA
tgtgtcaagttccgctttgtg

SEQ ID NO: 1921 - RNA, 21 nt, synthetic construct
  source 1..21: mol_type = other RNA
tgtgtgttttgtggattcttt

SEQ ID NO: 1922 - RNA, 21 nt, synthetic construct
  source 1..21: mol_type = other RNA
ttaatgccagatgagtttggt

SEQ ID NO: 1923 - RNA, 21 nt, synthetic construct
  source 1..21: mol_type = other RNA
ttacaaatgcatcttacacca

SEQ ID NO: 1924 - RNA, 21 nt, synthetic construct
  source 1..21: mol_type = other RNA
ttacaccaaactcatctggca

SEQ ID NO: 1925 - RNA, 21 nt, synthetic construct
  source 1..21: mol_type = other RNA
ttacggctgtacttggtcctt

SEQ ID NO: 1926 - RNA, 21 nt, synthetic construct
  source 1..21: mol_type = other RNA
ttaggaaaaggaagcaaaggg

SEQ ID NO: 1927 - RNA, 21 nt, synthetic construct
  source 1..21: mol_type = other RNA
ttcattctcctgacatgtctg

SEQ ID NO: 1928 - RNA, 21 nt, synthetic construct
  source 1..21: mol_type = other RNA
ttccgctttgtgctgatccta

SEQ ID NO: 1929 - RNA, 21 nt, synthetic construct
  source 1..21: mol_type = other RNA
ttcctaaaccaagtcccagac

SEQ ID NO: 1930 - RNA, 21 nt, synthetic construct
  source 1..21: mol_type = other RNA
ttccttttcctaaaccaagtc

SEQ ID NO: 1931 - RNA, 21 nt, synthetic construct
  source 1..21: mol_type = other RNA
ttcgtagtcgtaggatcagca

SEQ ID NO: 1932 - RNA, 21 nt, synthetic construct
  source 1..21: mol_type = other RNA
ttctccatccctttgcttcct

SEQ ID NO: 1933 - RNA, 21 nt, synthetic construct
  source 1..21: mol_type = other RNA
ttctcctgacatgtctgggac

SEQ ID NO: 1934 - RNA, 21 nt, synthetic construct
  source 1..21: mol_type = other RNA
ttgacacacttgtggagtttt

SEQ ID NO: 1935 - RNA, 21 nt, synthetic construct
  source 1..21: mol_type = other RNA
ttgcttccttttcctaaacca

SEQ ID NO: 1936 - RNA, 21 nt, synthetic construct
  source 1..21: mol_type = other RNA
ttggaaggcggtttggatttt

SEQ ID NO: 1937 - RNA, 21 nt, synthetic construct
  source 1..21: mol_type = other RNA
ttggtaaatttcgtagtcgta

SEQ ID NO: 1938 - RNA, 21 nt, synthetic construct
  source 1..21: mol_type = other RNA
ttggtccttctccatcccttt

SEQ ID NO: 1939 - RNA, 21 nt, synthetic construct
  source 1..21: mol_type = other RNA
ttggtgtaagatgcatttgta

SEQ ID NO: 1940 - RNA, 21 nt, synthetic construct
  source 1..21: mol_type = other RNA
ttggtttaggaaaaggaagca

SEQ ID NO: 1941 - RNA, 21 nt, synthetic construct
  source 1..21: mol_type = other RNA
ttgtgctgatcctacgactac

SEQ ID NO: 1942 - RNA, 21 nt, synthetic construct
  source 1..21: mol_type = other RNA
ttgtggagttttacggctgta

SEQ ID NO: 1943 - RNA, 21 nt, synthetic construct
  source 1..21: mol_type = other RNA
ttgtgtgttttgtggattctt

SEQ ID NO: 1944 - RNA, 21 nt, synthetic construct
  source 1..21: mol_type = other RNA
tttaatgccagatgagtttgg

SEQ ID NO: 1945 - RNA, 21 nt, synthetic construct
  source 1..21: mol_type = other RNA
tttacaaatgcatcttacacc

SEQ ID NO: 1946 - RNA, 21 nt, synthetic construct
  source 1..21: mol_type = other RNA
tttacggctgtacttggtcct

SEQ ID NO: 1947 - RNA, 21 nt, synthetic construct
  source 1..21: mol_type = other RNA
tttaggaaaaggaagcaaagg

SEQ ID NO: 1948 - RNA, 21 nt, synthetic construct
  source 1..21: mol_type = other RNA
tttcctaaaccaagtcccaga

SEQ ID NO: 1949 - RNA, 21 nt, synthetic construct
  source 1..21: mol_type = other RNA
tttcgtagtcgtaggatcagc

SEQ ID NO: 1950 - RNA, 21 nt, synthetic construct
  source 1..21: mol_type = other RNA
tttgcttccttttcctaaacc

SEQ ID NO: 1951 - RNA, 21 nt, synthetic construct
  source 1..21: mol_type = other RNA
tttggtaaatttcgtagtcgt

SEQ ID NO: 1952 - RNA, 21 nt, synthetic construct
  source 1..21: mol_type = other RNA
tttggtgtaagatgcatttgt

SEQ ID NO: 1953 - RNA, 21 nt, synthetic construct
  source 1..21: mol_type = other RNA
tttgtgctgatcctacgacta

SEQ ID NO: 1954 - RNA, 21 nt, synthetic construct
  source 1..21: mol_type = other RNA
tttgtgtgttttgtggattct

SEQ ID NO: 1955 - RNA, 21 nt, synthetic construct
  source 1..21: mol_type = other RNA
ttttaatgccagatgagtttg

SEQ ID NO: 1956 - RNA, 21 nt, synthetic construct
  source 1..21: mol_type = other RNA
ttttacggctgtacttggtcc

SEQ ID NO: 1957 - RNA, 21 nt, synthetic construct
  source 1..21: mol_type = other RNA
ttttcctaaaccaagtcccag

SEQ ID NO: 1958 - RNA, 21 nt, synthetic construct
  source 1..21: mol_type = other RNA
ttttggtaaatttcgtagtcg

SEQ ID NO: 1959 - RNA, 22 nt, synthetic construct
  source 1..22: mol_type = other RNA
aaaaagaatccacaaaacacac

SEQ ID NO: 1960 - RNA, 22 nt, synthetic construct
  source 1..22: mol_type = other RNA
aaaactccacaagtgtgtcaag

SEQ ID NO: 1961 - RNA, 22 nt, synthetic construct
  source 1..22: mol_type = other RNA
aaaagaatccacaaaacacaca

SEQ ID NO: 1962 - RNA, 22 nt, synthetic construct
  source 1..22: mol_type = other RNA
aaaaggaagcaaagggatggag

SEQ ID NO: 1963 - RNA, 22 nt, synthetic construct
  source 1..22: mol_type = other RNA
aaaatccaaaccgccttccaag

SEQ ID NO: 1964 - RNA, 22 nt, synthetic construct
  source 1..22: mol_type = other RNA
aaaatgaattcattctcctgac

SEQ ID NO: 1965 - RNA, 22 nt, synthetic construct
  source 1..22: mol_type = other RNA
aaaccaagtcccagacatgtca

SEQ ID NO: 1966 - RNA, 22 nt, synthetic construct
  source 1..22: mol_type = other RNA
aaaccgccttccaagtggggct

SEQ ID NO: 1967 - RNA, 22 nt, synthetic construct
  source 1..22: mol_type = other RNA
aaactccacaagtgtgtcaagt

SEQ ID NO: 1968 - RNA, 22 nt, synthetic construct
  source 1..22: mol_type = other RNA
aaagaatccacaaaacacacaa

SEQ ID NO: 1969 - RNA, 22 nt, synthetic construct
  source 1..22: mol_type = other RNA
aaagagccccacttggaaggcg

SEQ ID NO: 1970 - RNA, 22 nt, synthetic construct
  source 1..22: mol_type = other RNA
aaagcggaacttgacacacttg

SEQ ID NO: 1971 - RNA, 22 nt, synthetic construct
  source 1..22: mol_type = other RNA
aaaggaagcaaagggatggaga

SEQ ID NO: 1972 - RNA, 22 nt, synthetic construct
  source 1..22: mol_type = other RNA
aaagggatggagaaggaccaag

SEQ ID NO: 1973 - RNA, 22 nt, synthetic construct
  source 1..22: mol_type = other RNA
aaataaaatccaaaccgccttc

SEQ ID NO: 1974 - RNA, 22 nt, synthetic construct
  source 1..22: mol_type = other RNA
aaatccaaaccgccttccaagt

SEQ ID NO: 1975 - RNA, 22 nt, synthetic construct
  source 1..22: mol_type = other RNA
aaatgaattcattctcctgaca

SEQ ID NO: 1976 - RNA, 22 nt, synthetic construct
  source 1..22: mol_type = other RNA
aaatgcatcttacaccaaactc

SEQ ID NO: 1977 - RNA, 22 nt, synthetic construct
  source 1..22: mol_type = other RNA
aaatttcgtagtcgtaggatca

SEQ ID NO: 1978 - RNA, 22 nt, synthetic construct
  source 1..22: mol_type = other RNA
aaccaagtcccagacatgtcag

SEQ ID NO: 1979 - RNA, 22 nt, synthetic construct
  source 1..22: mol_type = other RNA
aaccgccttccaagtggggctc

SEQ ID NO: 1980 - RNA, 22 nt, synthetic construct
  source 1..22: mol_type = other RNA
aactcatctggcattaaaaatg

SEQ ID NO: 1981 - RNA, 22 nt, synthetic construct
  source 1..22: mol_type = other RNA
aactccacaagtgtgtcaagtt

SEQ ID NO: 1982 - RNA, 22 nt, synthetic construct
  source 1..22: mol_type = other RNA
aacttgacacacttgtggagtt

SEQ ID NO: 1983 - RNA, 22 nt, synthetic construct
  source 1..22: mol_type = other RNA
aagaatccacaaaacacacaaa

SEQ ID NO: 1984 - RNA, 22 nt, synthetic construct
  source 1..22: mol_type = other RNA
aagagccccacttggaaggcgg

SEQ ID NO: 1985 - RNA, 22 nt, synthetic construct
  source 1..22: mol_type = other RNA
aagcaaagggatggagaaggac

SEQ ID NO: 1986 - RNA, 22 nt, synthetic construct
  source 1..22: mol_type = other RNA
aagcggaacttgacacacttgt

SEQ ID NO: 1987 - RNA, 22 nt, synthetic construct
  source 1..22: mol_type = other RNA
aaggaagcaaagggatggagaa

SEQ ID NO: 1988 - RNA, 22 nt, synthetic construct
  source 1..22: mol_type = other RNA
aaggaccaagtacagccgtaaa

SEQ ID NO: 1989 - RNA, 22 nt, synthetic construct
  source 1..22: mol_type = other RNA
aaggcggtttggattttatttg

SEQ ID NO: 1990 - RNA, 22 nt, synthetic construct
  source 1..22: mol_type = other RNA
aagggatggagaaggaccaagt

SEQ ID NO: 1991 - RNA, 22 nt, synthetic construct
  source 1..22: mol_type = other RNA
aagtacagccgtaaaactccac

SEQ ID NO: 1992 - RNA, 22 nt, synthetic construct
  source 1..22: mol_type = other RNA
aagtcccagacatgtcaggaga

SEQ ID NO: 1993 - RNA, 22 nt, synthetic construct
  source 1..22: mol_type = other RNA
aagtgtgtcaagttccgctttg

SEQ ID NO: 1994 - RNA, 22 nt, synthetic construct
  source 1..22: mol_type = other RNA
aagttccgctttgtgctgatcc

SEQ ID NO: 1995 - RNA, 22 nt, synthetic construct
  source 1..22: mol_type = other RNA
aataaaatccaaaccgccttcc

SEQ ID NO: 1996 - RNA, 22 nt, synthetic construct
  source 1..22: mol_type = other RNA
aatccaaaccgccttccaagtg

SEQ ID NO: 1997 - RNA, 22 nt, synthetic construct
  source 1..22: mol_type = other RNA
aatgaattcattctcctgacat

SEQ ID NO: 1998 - RNA, 22 nt, synthetic construct
  source 1..22: mol_type = other RNA
aatgcatcttacaccaaactca

SEQ ID NO: 1999 - RNA, 22 nt, synthetic construct
  source 1..22: mol_type = other RNA
aatgccagatgagtttggtgta

SEQ ID NO: 2000 - RNA, 22 nt, synthetic construct
  source 1..22: mol_type = other RNA
aattcattctcctgacatgtct

SEQ ID NO: 2001 - RNA, 22 nt, synthetic construct
  source 1..22: mol_type = other RNA
aatttcgtagtcgtaggatcag

SEQ ID NO: 2002 - RNA, 22 nt, synthetic construct
  source 1..22: mol_type = other RNA
acaaagcggaacttgacacact

SEQ ID NO: 2003 - RNA, 22 nt, synthetic construct
  source 1..22: mol_type = other RNA
acaaataaaatccaaaccgcct

SEQ ID NO: 2004 - RNA, 22 nt, synthetic construct
  source 1..22: mol_type = other RNA
acaaatgcatcttacaccaaac

SEQ ID NO: 2005 - RNA, 22 nt, synthetic construct
  source 1..22: mol_type = other RNA
acaagtgtgtcaagttccgctt

SEQ ID NO: 2006 - RNA, 22 nt, synthetic construct
  source 1..22: mol_type = other RNA
acacaaataaaatccaaaccgc

SEQ ID NO: 2007 - RNA, 22 nt, synthetic construct
  source 1..22: mol_type = other RNA
acacacaaataaaatccaaacc

SEQ ID NO: 2008 - RNA, 22 nt, synthetic construct
  source 1..22: mol_type = other RNA
acacacttgtggagttttacgg

SEQ ID NO: 2009 - RNA, 22 nt, synthetic construct
  source 1..22: mol_type = other RNA
acaccaaactcatctggcatta

SEQ ID NO: 2010 - RNA, 22 nt, synthetic construct
  source 1..22: mol_type = other RNA
acacttgtggagttttacggct

SEQ ID NO: 2011 - RNA, 22 nt, synthetic construct
  source 1..22: mol_type = other RNA
acagccgtaaaactccacaagt

SEQ ID NO: 2012 - RNA, 22 nt, synthetic construct
  source 1..22: mol_type = other RNA
acatgtcaggagaatgaattca

SEQ ID NO: 2013 - RNA, 22 nt, synthetic construct
  source 1..22: mol_type = other RNA
acatgtctgggacttggtttag

SEQ ID NO: 2014 - RNA, 22 nt, synthetic construct
  source 1..22: mol_type = other RNA
accaaactcatctggcattaaa

SEQ ID NO: 2015 - RNA, 22 nt, synthetic construct
  source 1..22: mol_type = other RNA
accaagtacagccgtaaaactc

SEQ ID NO: 2016 - RNA, 22 nt, synthetic construct
  source 1..22: mol_type = other RNA
accaagtcccagacatgtcagg

SEQ ID NO: 2017 - RNA, 22 nt, synthetic construct
  source 1..22: mol_type = other RNA
acggctgtacttggtccttctc

SEQ ID NO: 2018 - RNA, 22 nt, synthetic construct
  source 1..22: mol_type = other RNA
actcatctggcattaaaaatga

SEQ ID NO: 2019 - RNA, 22 nt, synthetic construct
  source 1..22: mol_type = other RNA
actccacaagtgtgtcaagttc

SEQ ID NO: 2020 - RNA, 22 nt, synthetic construct
  source 1..22: mol_type = other RNA
acttgacacacttgtggagttt

SEQ ID NO: 2021 - RNA, 22 nt, synthetic construct
  source 1..22: mol_type = other RNA
acttggaaggcggtttggattt

SEQ ID NO: 2022 - RNA, 22 nt, synthetic construct
  source 1..22: mol_type = other RNA
acttggtccttctccatccctt

SEQ ID NO: 2023 - RNA, 22 nt, synthetic construct
  source 1..22: mol_type = other RNA
acttggtttaggaaaaggaagc

SEQ ID NO: 2024 - RNA, 22 nt, synthetic construct
  source 1..22: mol_type = other RNA
acttgtggagttttacggctgt

SEQ ID NO: 2025 - RNA, 22 nt, synthetic construct
  source 1..22: mol_type = other RNA
agaaggaccaagtacagccgta

SEQ ID NO: 2026 - RNA, 22 nt, synthetic construct
  source 1..22: mol_type = other RNA
agaatccacaaaacacacaaat

SEQ ID NO: 2027 - RNA, 22 nt, synthetic construct
  source 1..22: mol_type = other RNA
agacatgtcaggagaatgaatt

SEQ ID NO: 2028 - RNA, 22 nt, synthetic construct
  source 1..22: mol_type = other RNA
agagccccacttggaaggcggt

SEQ ID NO: 2029 - RNA, 22 nt, synthetic construct
  source 1..22: mol_type = other RNA
agatgagtttggtgtaagatgc

SEQ ID NO: 2030 - RNA, 22 nt, synthetic construct
  source 1..22: mol_type = other RNA
agcaaagggatggagaaggacc

SEQ ID NO: 2031 - RNA, 22 nt, synthetic construct
  source 1..22: mol_type = other RNA
agcacaaagcggaacttgacac

SEQ ID NO: 2032 - RNA, 22 nt, synthetic construct
  source 1..22: mol_type = other RNA
agccccacttggaaggcggttt

SEQ ID NO: 2033 - RNA, 22 nt, synthetic construct
  source 1..22: mol_type = other RNA
agccgtaaaactccacaagtgt

SEQ ID NO: 2034 - RNA, 22 nt, synthetic construct
  source 1..22: mol_type = other RNA
agcggaacttgacacacttgtg

SEQ ID NO: 2035 - RNA, 22 nt, synthetic construct
  source 1..22: mol_type = other RNA
aggaaaaggaagcaaagggatg

SEQ ID NO: 2036 - RNA, 22 nt, synthetic construct
  source 1..22: mol_type = other RNA
aggaagcaaagggatggagaag

SEQ ID NO: 2037 - RNA, 22 nt, synthetic construct
  source 1..22: mol_type = other RNA
aggaccaagtacagccgtaaaa

SEQ ID NO: 2038 - RNA, 22 nt, synthetic construct
  source 1..22: mol_type = other RNA
aggatcagcacaaagcggaact

SEQ ID NO: 2039 - RNA, 22 nt, synthetic construct
  source 1..22: mol_type = other RNA
aggcggtttggattttatttgt

SEQ ID NO: 2040 - RNA, 22 nt, synthetic construct
  source 1..22: mol_type = other RNA
agggatggagaaggaccaagta

SEQ ID NO: 2041 - RNA, 22 nt, synthetic construct
  source 1..22: mol_type = other RNA
agtacagccgtaaaactccaca

SEQ ID NO: 2042 - RNA, 22 nt, synthetic construct
  source 1..22: mol_type = other RNA
agtcccagacatgtcaggagaa

SEQ ID NO: 2043 - RNA, 22 nt, synthetic construct
  source 1..22: mol_type = other RNA
agtcgtaggatcagcacaaagc

SEQ ID NO: 2044 - RNA, 22 nt, synthetic construct
  source 1..22: mol_type = other RNA
agtgtgtcaagttccgctttgt

SEQ ID NO: 2045 - RNA, 22 nt, synthetic construct
  source 1..22: mol_type = other RNA
agttccgctttgtgctgatcct

SEQ ID NO: 2046 - RNA, 22 nt, synthetic construct
  source 1..22: mol_type = other RNA
agtttggtgtaagatgcatttg

SEQ ID NO: 2047 - RNA, 22 nt, synthetic construct
  source 1..22: mol_type = other RNA
agttttacggctgtacttggtc

SEQ ID NO: 2048 - RNA, 22 nt, synthetic construct
  source 1..22: mol_type = other RNA
ataaaatccaaaccgccttcca

SEQ ID NO: 2049 - RNA, 22 nt, synthetic construct
  source 1..22: mol_type = other RNA
atcagcacaaagcggaacttga

SEQ ID NO: 2050 - RNA, 22 nt, synthetic construct
  source 1..22: mol_type = other RNA
atccaaaccgccttccaagtgg

SEQ ID NO: 2051 - RNA, 22 nt, synthetic construct
  source 1..22: mol_type = other RNA
atccctttgcttccttttccta

SEQ ID NO: 2052 - RNA, 22 nt, synthetic construct
  source 1..22: mol_type = other RNA
atcttacaccaaactcatctgg

SEQ ID NO: 2053 - RNA, 22 nt, synthetic construct
  source 1..22: mol_type = other RNA
atgaaagagccccacttggaag

SEQ ID NO: 2054 - RNA, 22 nt, synthetic construct
  source 1..22: mol_type = other RNA
atgaattcattctcctgacatg

SEQ ID NO: 2055 - RNA, 22 nt, synthetic construct
  source 1..22: mol_type = other RNA
atgagtttggtgtaagatgcat

SEQ ID NO: 2056 - RNA, 22 nt, synthetic construct
  source 1..22: mol_type = other RNA
atgcatcttacaccaaactcat

SEQ ID NO: 2057 - RNA, 22 nt, synthetic construct
  source 1..22: mol_type = other RNA
atgccagatgagtttggtgtaa

SEQ ID NO: 2058 - RNA, 22 nt, synthetic construct
  source 1..22: mol_type = other RNA
atggagaaggaccaagtacagc

SEQ ID NO: 2059 - RNA, 22 nt, synthetic construct
  source 1..22: mol_type = other RNA
atgtcaggagaatgaattcatt

SEQ ID NO: 2060 - RNA, 22 nt, synthetic construct
  source 1..22: mol_type = other RNA
atgtctgggacttggtttagga

SEQ ID NO: 2061 - RNA, 22 nt, synthetic construct
  source 1..22: mol_type = other RNA
attcattctcctgacatgtctg

SEQ ID NO: 2062 - RNA, 22 nt, synthetic construct
  source 1..22: mol_type = other RNA
attctcctgacatgtctgggac

SEQ ID NO: 2063 - RNA, 22 nt, synthetic construct
  source 1..22: mol_type = other RNA
atttcgtagtcgtaggatcagc

SEQ ID NO: 2064 - RNA, 22 nt, synthetic construct
  source 1..22: mol_type = other RNA
atttgtgtgttttgtggattct

SEQ ID NO: 2065 - RNA, 22 nt, synthetic construct
  source 1..22: mol_type = other RNA
caaaccgccttccaagtggggc

SEQ ID NO: 2066 - RNA, 22 nt, synthetic construct
  source 1..22: mol_type = other RNA
caaactcatctggcattaaaaa

SEQ ID NO: 2067 - RNA, 22 nt, synthetic construct
  source 1..22: mol_type = other RNA
caaagcggaacttgacacactt

SEQ ID NO: 2068 - RNA, 22 nt, synthetic construct
  source 1..22: mol_type = other RNA
caaagggatggagaaggaccaa

SEQ ID NO: 2069 - RNA, 22 nt, synthetic construct
  source 1..22: mol_type = other RNA
caaataaaatccaaaccgcctt

SEQ ID NO: 2070 - RNA, 22 nt, synthetic construct
  source 1..22: mol_type = other RNA
caaatgcatcttacaccaaact

SEQ ID NO: 2071 - RNA, 22 nt, synthetic construct
  source 1..22: mol_type = other RNA
caagtacagccgtaaaactcca

SEQ ID NO: 2072 - RNA, 22 nt, synthetic construct
  source 1..22: mol_type = other RNA
caagtcccagacatgtcaggag

SEQ ID NO: 2073 - RNA, 22 nt, synthetic construct
  source 1..22: mol_type = other RNA
caagtgtgtcaagttccgcttt

SEQ ID NO: 2074 - RNA, 22 nt, synthetic construct
  source 1..22: mol_type = other RNA
caagttccgctttgtgctgatc

SEQ ID NO: 2075 - RNA, 22 nt, synthetic construct
  source 1..22: mol_type = other RNA
cacaaagcggaacttgacacac

SEQ ID NO: 2076 - RNA, 22 nt, synthetic construct
  source 1..22: mol_type = other RNA
cacaaataaaatccaaaccgcc

SEQ ID NO: 2077 - RNA, 22 nt, synthetic construct
  source 1..22: mol_type = other RNA
cacaagtgtgtcaagttccgct

SEQ ID NO: 2078 - RNA, 22 nt, synthetic construct
  source 1..22: mol_type = other RNA
cacacaaataaaatccaaaccg

SEQ ID NO: 2079 - RNA, 22 nt, synthetic construct
  source 1..22: mol_type = other RNA
cacacttgtggagttttacggc

SEQ ID NO: 2080 - RNA, 22 nt, synthetic construct
  source 1..22: mol_type = other RNA
caccaaactcatctggcattaa

SEQ ID NO: 2081 - RNA, 22 nt, synthetic construct
  source 1..22: mol_type = other RNA
cacttggaaggcggtttggatt

SEQ ID NO: 2082 - RNA, 22 nt, synthetic construct
  source 1..22: mol_type = other RNA
cacttgtggagttttacggctg

SEQ ID NO: 2083 - RNA, 22 nt, synthetic construct
  source 1..22: mol_type = other RNA
cagacatgtcaggagaatgaat

SEQ ID NO: 2084 - RNA, 22 nt, synthetic construct
  source 1..22: mol_type = other RNA
cagatgagtttggtgtaagatg

SEQ ID NO: 2085 - RNA, 22 nt, synthetic construct
  source 1..22: mol_type = other RNA
cagcacaaagcggaacttgaca

SEQ ID NO: 2086 - RNA, 22 nt, synthetic construct
  source 1..22: mol_type = other RNA
cagccgtaaaactccacaagtg

SEQ ID NO: 2087 - RNA, 22 nt, synthetic construct
  source 1..22: mol_type = other RNA
catccctttgcttccttttcct

SEQ ID NO: 2088 - RNA, 22 nt, synthetic construct
  source 1..22: mol_type = other RNA
catcttacaccaaactcatctg

SEQ ID NO: 2089 - RNA, 22 nt, synthetic construct
  source 1..22: mol_type = other RNA
catgaaagagccccacttggaa

SEQ ID NO: 2090 - RNA, 22 nt, synthetic construct
  source 1..22: mol_type = other RNA
catgtcaggagaatgaattcat

SEQ ID NO: 2091 - RNA, 22 nt, synthetic construct
  source 1..22: mol_type = other RNA
catgtctgggacttggtttagg

SEQ ID NO: 2092 - RNA, 22 nt, synthetic construct
  source 1..22: mol_type = other RNA
cattctcctgacatgtctggga

SEQ ID NO: 2093 - RNA, 22 nt, synthetic construct
  source 1..22: mol_type = other RNA
catttttaatgccagatgagtt

SEQ ID NO: 2094 - RNA, 22 nt, synthetic construct
  source 1..22: mol_type = other RNA
ccaaaccgccttccaagtgggg

SEQ ID NO: 2095 - RNA, 22 nt, synthetic construct
  source 1..22: mol_type = other RNA
ccaaactcatctggcattaaaa

SEQ ID NO: 2096 - RNA, 22 nt, synthetic construct
  source 1..22: mol_type = other RNA
ccaagtacagccgtaaaactcc

SEQ ID NO: 2097 - RNA, 22 nt, synthetic construct
  source 1..22: mol_type = other RNA
ccaagtcccagacatgtcagga

SEQ ID NO: 2098 - RNA, 22 nt, synthetic construct
  source 1..22: mol_type = other RNA
ccacaagtgtgtcaagttccgc

SEQ ID NO: 2099 - RNA, 22 nt, synthetic construct
  source 1..22: mol_type = other RNA
ccacttggaaggcggtttggat

SEQ ID NO: 2100 - RNA, 22 nt, synthetic construct
  source 1..22: mol_type = other RNA
ccagacatgtcaggagaatgaa

SEQ ID NO: 2101 - RNA, 22 nt, synthetic construct
  source 1..22: mol_type = other RNA
ccagatgagtttggtgtaagat

SEQ ID NO: 2102 - RNA, 22 nt, synthetic construct
  source 1..22: mol_type = other RNA
ccatccctttgcttccttttcc

SEQ ID NO: 2103 - RNA, 22 nt, synthetic construct
  source 1..22: mol_type = other RNA
cccacttggaaggcggtttgga

SEQ ID NO: 2104 - RNA, 22 nt, synthetic construct
  source 1..22: mol_type = other RNA
cccagacatgtcaggagaatga

SEQ ID NO: 2105 - RNA, 22 nt, synthetic construct
  source 1..22: mol_type = other RNA
ccccacttggaaggcggtttgg

SEQ ID NO: 2106 - RNA, 22 nt, synthetic construct
  source 1..22: mol_type = other RNA
ccctttgcttccttttcctaaa

SEQ ID NO: 2107 - RNA, 22 nt, synthetic construct
  source 1..22: mol_type = other RNA
ccgctttgtgctgatcctacga

SEQ ID NO: 2108 - RNA, 22 nt, synthetic construct
  source 1..22: mol_type = other RNA
ccgtaaaactccacaagtgtgt

SEQ ID NO: 2109 - RNA, 22 nt, synthetic construct
  source 1..22: mol_type = other RNA
cctaaaccaagtcccagacatg

SEQ ID NO: 2110 - RNA, 22 nt, synthetic construct
  source 1..22: mol_type = other RNA
cctgacatgtctgggacttggt

SEQ ID NO: 2111 - RNA, 22 nt, synthetic construct
  source 1..22: mol_type = other RNA
ccttctccatccctttgcttcc

SEQ ID NO: 2112 - RNA, 22 nt, synthetic construct
  source 1..22: mol_type = other RNA
cctttgcttccttttcctaaac

SEQ ID NO: 2113 - RNA, 22 nt, synthetic construct
  source 1..22: mol_type = other RNA
ccttttcctaaaccaagtccca

SEQ ID NO: 2114 - RNA, 22 nt, synthetic construct
  source 1..22: mol_type = other RNA
cgctttgtgctgatcctacgac

SEQ ID NO: 2115 - RNA, 22 nt, synthetic construct
  source 1..22: mol_type = other RNA
cggaacttgacacacttgtgga

SEQ ID NO: 2116 - RNA, 22 nt, synthetic construct
  source 1..22: mol_type = other RNA
cggctgtacttggtccttctcc

SEQ ID NO: 2117 - RNA, 22 nt, synthetic construct
  source 1..22: mol_type = other RNA
cggtttggattttatttgtgtg

SEQ ID NO: 2118 - RNA, 22 nt, synthetic construct
  source 1..22: mol_type = other RNA
cgtaaaactccacaagtgtgtc

SEQ ID NO: 2119 - RNA, 22 nt, synthetic construct
  source 1..22: mol_type = other RNA
cgtaggatcagcacaaagcgga

SEQ ID NO: 2120 - RNA, 22 nt, synthetic construct
  source 1..22: mol_type = other RNA
cgtagtcgtaggatcagcacaa

SEQ ID NO: 2121 - RNA, 22 nt, synthetic construct
  source 1..22: mol_type = other RNA
ctaaaccaagtcccagacatgt

SEQ ID NO: 2122 - RNA, 22 nt, synthetic construct
  source 1..22: mol_type = other RNA
ctcatctggcattaaaaatgaa

SEQ ID NO: 2123 - RNA, 22 nt, synthetic construct
  source 1..22: mol_type = other RNA
ctccacaagtgtgtcaagttcc

SEQ ID NO: 2124 - RNA, 22 nt, synthetic construct
  source 1..22: mol_type = other RNA
ctccatccctttgcttcctttt

SEQ ID NO: 2125 - RNA, 22 nt, synthetic construct
  source 1..22: mol_type = other RNA
ctcctgacatgtctgggacttg

SEQ ID NO: 2126 - RNA, 22 nt, synthetic construct
  source 1..22: mol_type = other RNA
ctgacatgtctgggacttggtt

SEQ ID NO: 2127 - RNA, 22 nt, synthetic construct
  source 1..22: mol_type = other RNA
ctgatcctacgactacgaaatt

SEQ ID NO: 2128 - RNA, 22 nt, synthetic construct
  source 1..22: mol_type = other RNA
ctgggacttggtttaggaaaag

SEQ ID NO: 2129 - RNA, 22 nt, synthetic construct
  source 1..22: mol_type = other RNA
ctgtacttggtccttctccatc

SEQ ID NO: 2130 - RNA, 22 nt, synthetic construct
  source 1..22: mol_type = other RNA
cttacaccaaactcatctggca

SEQ ID NO: 2131 - RNA, 22 nt, synthetic construct
  source 1..22: mol_type = other RNA
cttccttttcctaaaccaagtc

SEQ ID NO: 2132 - RNA, 22 nt, synthetic construct
  source 1..22: mol_type = other RNA
cttctccatccctttgcttcct

SEQ ID NO: 2133 - RNA, 22 nt, synthetic construct
  source 1..22: mol_type = other RNA
cttgacacacttgtggagtttt

SEQ ID NO: 2134 - RNA, 22 nt, synthetic construct
  source 1..22: mol_type = other RNA
cttggaaggcggtttggatttt

SEQ ID NO: 2135 - RNA, 22 nt, synthetic construct
  source 1..22: mol_type = other RNA
cttggtccttctccatcccttt

SEQ ID NO: 2136 - RNA, 22 nt, synthetic construct
  source 1..22: mol_type = other RNA
cttggtttaggaaaaggaagca

SEQ ID NO: 2137 - RNA, 22 nt, synthetic construct
  source 1..22: mol_type = other RNA
cttgtggagttttacggctgta

SEQ ID NO: 2138 - RNA, 22 nt, synthetic construct
  source 1..22: mol_type = other RNA
ctttacaaatgcatcttacacc

SEQ ID NO: 2139 - RNA, 22 nt, synthetic construct
  source 1..22: mol_type = other RNA
ctttgcttccttttcctaaacc

SEQ ID NO: 2140 - RNA, 22 nt, synthetic construct
  source 1..22: mol_type = other RNA
ctttgtgctgatcctacgacta

SEQ ID NO: 2141 - RNA, 22 nt, synthetic construct
  source 1..22: mol_type = other RNA
cttttcctaaaccaagtcccag

SEQ ID NO: 2142 - RNA, 22 nt, synthetic construct
  source 1..22: mol_type = other RNA
gaaaaggaagcaaagggatgga

SEQ ID NO: 2143 - RNA, 22 nt, synthetic construct
  source 1..22: mol_type = other RNA
gaaagagccccacttggaaggc

SEQ ID NO: 2144 - RNA, 22 nt, synthetic construct
  source 1..22: mol_type = other RNA
gaacttgacacacttgtggagt

SEQ ID NO: 2145 - RNA, 22 nt, synthetic construct
  source 1..22: mol_type = other RNA
gaagcaaagggatggagaagga

SEQ ID NO: 2146 - RNA, 22 nt, synthetic construct
  source 1..22: mol_type = other RNA
gaaggaccaagtacagccgtaa

SEQ ID NO: 2147 - RNA, 22 nt, synthetic construct
  source 1..22: mol_type = other RNA
gaaggcggtttggattttattt

SEQ ID NO: 2148 - RNA, 22 nt, synthetic construct
  source 1..22: mol_type = other RNA
gaatccacaaaacacacaaata

SEQ ID NO: 2149 - RNA, 22 nt, synthetic construct
  source 1..22: mol_type = other RNA
gaattcattctcctgacatgtc

SEQ ID NO: 2150 - RNA, 22 nt, synthetic construct
  source 1..22: mol_type = other RNA
gacacacttgtggagttttacg

SEQ ID NO: 2151 - RNA, 22 nt, synthetic construct
  source 1..22: mol_type = other RNA
gacatgtcaggagaatgaattc

SEQ ID NO: 2152 - RNA, 22 nt, synthetic construct
  source 1..22: mol_type = other RNA
gacatgtctgggacttggttta

SEQ ID NO: 2153 - RNA, 22 nt, synthetic construct
  source 1..22: mol_type = other RNA
gaccaagtacagccgtaaaact

SEQ ID NO: 2154 - RNA, 22 nt, synthetic construct
  source 1..22: mol_type = other RNA
gacttggtttaggaaaaggaag

SEQ ID NO: 2155 - RNA, 22 nt, synthetic construct
  source 1..22: mol_type = other RNA
gagaaggaccaagtacagccgt

SEQ ID NO: 2156 - RNA, 22 nt, synthetic construct
  source 1..22: mol_type = other RNA
gagccccacttggaaggcggtt

SEQ ID NO: 2157 - RNA, 22 nt, synthetic construct
  source 1..22: mol_type = other RNA
gagtttggtgtaagatgcattt

SEQ ID NO: 2158 - RNA, 22 nt, synthetic construct
  source 1..22: mol_type = other RNA
gagttttacggctgtacttggt

SEQ ID NO: 2159 - RNA, 22 nt, synthetic construct
  source 1..22: mol_type = other RNA
gatcagcacaaagcggaacttg

SEQ ID NO: 2160 - RNA, 22 nt, synthetic construct
  source 1..22: mol_type = other RNA
gatgagtttggtgtaagatgca

SEQ ID NO: 2161 - RNA, 22 nt, synthetic construct
  source 1..22: mol_type = other RNA
gatggagaaggaccaagtacag

SEQ ID NO: 2162 - RNA, 22 nt, synthetic construct
  source 1..22: mol_type = other RNA
gcaaagggatggagaaggacca

SEQ ID NO: 2163 - RNA, 22 nt, synthetic construct
  source 1..22: mol_type = other RNA
gcacaaagcggaacttgacaca

SEQ ID NO: 2164 - RNA, 22 nt, synthetic construct
  source 1..22: mol_type = other RNA
gcatcttacaccaaactcatct

SEQ ID NO: 2165 - RNA, 22 nt, synthetic construct
  source 1..22: mol_type = other RNA
gcatgaaagagccccacttgga

SEQ ID NO: 2166 - RNA, 22 nt, synthetic construct
  source 1..22: mol_type = other RNA
gccagatgagtttggtgtaaga

SEQ ID NO: 2167 - RNA, 22 nt, synthetic construct
  source 1..22: mol_type = other RNA
gccccacttggaaggcggtttg

SEQ ID NO: 2168 - RNA, 22 nt, synthetic construct
  source 1..22: mol_type = other RNA
gccgtaaaactccacaagtgtg

SEQ ID NO: 2169 - RNA, 22 nt, synthetic construct
  source 1..22: mol_type = other RNA
gcggaacttgacacacttgtgg

SEQ ID NO: 2170 - RNA, 22 nt, synthetic construct
  source 1..22: mol_type = other RNA
gcggtttggattttatttgtgt

SEQ ID NO: 2171 - RNA, 22 nt, synthetic construct
  source 1..22: mol_type = other RNA
gctgatcctacgactacgaaat

SEQ ID NO: 2172 - RNA, 22 nt, synthetic construct
  source 1..22: mol_type = other RNA
gctgtacttggtccttctccat

SEQ ID NO: 2173 - RNA, 22 nt, synthetic construct
  source 1..22: mol_type = other RNA
gcttccttttcctaaaccaagt

SEQ ID NO: 2174 - RNA, 22 nt, synthetic construct
  source 1..22: mol_type = other RNA
gctttacaaatgcatcttacac

SEQ ID NO: 2175 - RNA, 22 nt, synthetic construct
  source 1..22: mol_type = other RNA
gctttgtgctgatcctacgact

SEQ ID NO: 2176 - RNA, 22 nt, synthetic construct
  source 1..22: mol_type = other RNA
ggaaaaggaagcaaagggatgg

SEQ ID NO: 2177 - RNA, 22 nt, synthetic construct
  source 1..22: mol_type = other RNA
ggaacttgacacacttgtggag

SEQ ID NO: 2178 - RNA, 22 nt, synthetic construct
  source 1..22: mol_type = other RNA
ggaagcaaagggatggagaagg

SEQ ID NO: 2179 - RNA, 22 nt, synthetic construct
  source 1..22: mol_type = other RNA
ggaaggcggtttggattttatt

SEQ ID NO: 2180 - RNA, 22 nt, synthetic construct
  source 1..22: mol_type = other RNA
ggaccaagtacagccgtaaaac

SEQ ID NO: 2181 - RNA, 22 nt, synthetic construct
  source 1..22: mol_type = other RNA
ggacttggtttaggaaaaggaa

SEQ ID NO: 2182 - RNA, 22 nt, synthetic construct
  source 1..22: mol_type = other RNA
ggagaaggaccaagtacagccg

SEQ ID NO: 2183 - RNA, 22 nt, synthetic construct
  source 1..22: mol_type = other RNA
ggagttttacggctgtacttgg

SEQ ID NO: 2184 - RNA, 22 nt, synthetic construct
  source 1..22: mol_type = other RNA
ggatcagcacaaagcggaactt

SEQ ID NO: 2185 - RNA, 22 nt, synthetic construct
  source 1..22: mol_type = other RNA
ggatggagaaggaccaagtaca

SEQ ID NO: 2186 - RNA, 22 nt, synthetic construct
  source 1..22: mol_type = other RNA
ggcggtttggattttatttgtg

SEQ ID NO: 2187 - RNA, 22 nt, synthetic construct
  source 1..22: mol_type = other RNA
ggctgtacttggtccttctcca

SEQ ID NO: 2188 - RNA, 22 nt, synthetic construct
  source 1..22: mol_type = other RNA
gggacttggtttaggaaaagga

SEQ ID NO: 2189 - RNA, 22 nt, synthetic construct
  source 1..22: mol_type = other RNA
gggatggagaaggaccaagtac

SEQ ID NO: 2190 - RNA, 22 nt, synthetic construct
  source 1..22: mol_type = other RNA
ggtaaatttcgtagtcgtagga

SEQ ID NO: 2191 - RNA, 22 nt, synthetic construct
  source 1..22: mol_type = other RNA
ggtccttctccatccctttgct

SEQ ID NO: 2192 - RNA, 22 nt, synthetic construct
  source 1..22: mol_type = other RNA
ggtgtaagatgcatttgtaaag

SEQ ID NO: 2193 - RNA, 22 nt, synthetic construct
  source 1..22: mol_type = other RNA
ggtttaggaaaaggaagcaaag

SEQ ID NO: 2194 - RNA, 22 nt, synthetic construct
  source 1..22: mol_type = other RNA
ggtttggattttatttgtgtgt

SEQ ID NO: 2195 - RNA, 22 nt, synthetic construct
  source 1..22: mol_type = other RNA
gtaaaactccacaagtgtgtca

SEQ ID NO: 2196 - RNA, 22 nt, synthetic construct
  source 1..22: mol_type = other RNA
gtaaatttcgtagtcgtaggat

SEQ ID NO: 2197 - RNA, 22 nt, synthetic construct
  source 1..22: mol_type = other RNA
gtaagatgcatttgtaaagcaa

SEQ ID NO: 2198 - RNA, 22 nt, synthetic construct
  source 1..22: mol_type = other RNA
gtacagccgtaaaactccacaa

SEQ ID NO: 2199 - RNA, 22 nt, synthetic construct
  source 1..22: mol_type = other RNA
gtacttggtccttctccatccc

SEQ ID NO: 2200 - RNA, 22 nt, synthetic construct
  source 1..22: mol_type = other RNA
gtaggatcagcacaaagcggaa

SEQ ID NO: 2201 - RNA, 22 nt, synthetic construct
  source 1..22: mol_type = other RNA
gtagtcgtaggatcagcacaaa

SEQ ID NO: 2202 - RNA, 22 nt, synthetic construct
  source 1..22: mol_type = other RNA
gtcaagttccgctttgtgctga

SEQ ID NO: 2203 - RNA, 22 nt, synthetic construct
  source 1..22: mol_type = other RNA
gtcaggagaatgaattcatttt

SEQ ID NO: 2204 - RNA, 22 nt, synthetic construct
  source 1..22: mol_type = other RNA
gtcccagacatgtcaggagaat

SEQ ID NO: 2205 - RNA, 22 nt, synthetic construct
  source 1..22: mol_type = other RNA
gtccttctccatccctttgctt

SEQ ID NO: 2206 - RNA, 22 nt, synthetic construct
  source 1..22: mol_type = other RNA
gtcgtaggatcagcacaaagcg

SEQ ID NO: 2207 - RNA, 22 nt, synthetic construct
  source 1..22: mol_type = other RNA
gtctgggacttggtttaggaaa

SEQ ID NO: 2208 - RNA, 22 nt, synthetic construct
  source 1..22: mol_type = other RNA
gtgctgatcctacgactacgaa

SEQ ID NO: 2209 - RNA, 22 nt, synthetic construct
  source 1..22: mol_type = other RNA
gtggagttttacggctgtactt

SEQ ID NO: 2210 - RNA, 22 nt, synthetic construct
  source 1..22: mol_type = other RNA
gtgtaagatgcatttgtaaagc

SEQ ID NO: 2211 - RNA, 22 nt, synthetic construct
  source 1..22: mol_type = other RNA
gtgtcaagttccgctttgtgct

SEQ ID NO: 2212 - RNA, 22 nt, synthetic construct
  source 1..22: mol_type = other RNA
gtgtgtcaagttccgctttgtg

SEQ ID NO: 2213 - RNA, 22 nt, synthetic construct
  source 1..22: mol_type = other RNA
gtgtgttttgtggattcttttt

SEQ ID NO: 2214 - RNA, 22 nt, synthetic construct
  source 1..22: mol_type = other RNA
gttccgctttgtgctgatccta

SEQ ID NO: 2215 - RNA, 22 nt, synthetic construct
  source 1..22: mol_type = other RNA
gtttaggaaaaggaagcaaagg

SEQ ID NO: 2216 - RNA, 22 nt, synthetic construct
  source 1..22: mol_type = other RNA
gtttggtgtaagatgcatttgt

SEQ ID NO: 2217 - RNA, 22 nt, synthetic construct
  source 1..22: mol_type = other RNA
gttttacggctgtacttggtcc

SEQ ID NO: 2218 - RNA, 22 nt, synthetic construct
  source 1..22: mol_type = other RNA
taaaactccacaagtgtgtcaa

SEQ ID NO: 2219 - RNA, 22 nt, synthetic construct
  source 1..22: mol_type = other RNA
taaaatccaaaccgccttccaa

SEQ ID NO: 2220 - RNA, 22 nt, synthetic construct
  source 1..22: mol_type = other RNA
taaaccaagtcccagacatgtc

SEQ ID NO: 2221 - RNA, 22 nt, synthetic construct
  source 1..22: mol_type = other RNA
taaatttcgtagtcgtaggatc

SEQ ID NO: 2222 - RNA, 22 nt, synthetic construct
  source 1..22: mol_type = other RNA
taatgccagatgagtttggtgt

SEQ ID NO: 2223 - RNA, 22 nt, synthetic construct
  source 1..22: mol_type = other RNA
tacaaatgcatcttacaccaaa

SEQ ID NO: 2224 - RNA, 22 nt, synthetic construct
  source 1..22: mol_type = other RNA
tacaccaaactcatctggcatt

SEQ ID NO: 2225 - RNA, 22 nt, synthetic construct
  source 1..22: mol_type = other RNA
tacagccgtaaaactccacaag

SEQ ID NO: 2226 - RNA, 22 nt, synthetic construct
  source 1..22: mol_type = other RNA
tacggctgtacttggtccttct

SEQ ID NO: 2227 - RNA, 22 nt, synthetic construct
  source 1..22: mol_type = other RNA
tacttggtccttctccatccct

SEQ ID NO: 2228 - RNA, 22 nt, synthetic construct
  source 1..22: mol_type = other RNA
taggaaaaggaagcaaagggat

SEQ ID NO: 2229 - RNA, 22 nt, synthetic construct
  source 1..22: mol_type = other RNA
taggatcagcacaaagcggaac

SEQ ID NO: 2230 - RNA, 22 nt, synthetic construct
  source 1..22: mol_type = other RNA
tagtcgtaggatcagcacaaag

SEQ ID NO: 2231 - RNA, 22 nt, synthetic construct
  source 1..22: mol_type = other RNA
tatttgtgtgttttgtggattc

SEQ ID NO: 2232 - RNA, 22 nt, synthetic construct
  source 1..22: mol_type = other RNA
tcaagttccgctttgtgctgat

SEQ ID NO: 2233 - RNA, 22 nt, synthetic construct
  source 1..22: mol_type = other RNA
tcagcacaaagcggaacttgac

SEQ ID NO: 2234 - RNA, 22 nt, synthetic construct
  source 1..22: mol_type = other RNA
tcattctcctgacatgtctggg

SEQ ID NO: 2235 - RNA, 22 nt, synthetic construct
  source 1..22: mol_type = other RNA
tcatttttaatgccagatgagt

SEQ ID NO: 2236 - RNA, 22 nt, synthetic construct
  source 1..22: mol_type = other RNA
tccaaaccgccttccaagtggg

SEQ ID NO: 2237 - RNA, 22 nt, synthetic construct
  source 1..22: mol_type = other RNA
tccacaagtgtgtcaagttccg

SEQ ID NO: 2238 - RNA, 22 nt, synthetic construct
  source 1..22: mol_type = other RNA
tccatccctttgcttccttttc

SEQ ID NO: 2239 - RNA, 22 nt, synthetic construct
  source 1..22: mol_type = other RNA
tcccagacatgtcaggagaatg

SEQ ID NO: 2240 - RNA, 22 nt, synthetic construct
  source 1..22: mol_type = other RNA
tccctttgcttccttttcctaa

SEQ ID NO: 2241 - RNA, 22 nt, synthetic construct
  source 1..22: mol_type = other RNA
tccgctttgtgctgatcctacg

SEQ ID NO: 2242 - RNA, 22 nt, synthetic construct
  source 1..22: mol_type = other RNA
tcctaaaccaagtcccagacat

SEQ ID NO: 2243 - RNA, 22 nt, synthetic construct
  source 1..22: mol_type = other RNA
tcctgacatgtctgggacttgg

SEQ ID NO: 2244 - RNA, 22 nt, synthetic construct
  source 1..22: mol_type = other RNA
tccttctccatccctttgcttc

SEQ ID NO: 2245 - RNA, 22 nt, synthetic construct
  source 1..22: mol_type = other RNA
tccttttcctaaaccaagtccc

SEQ ID NO: 2246 - RNA, 22 nt, synthetic construct
  source 1..22: mol_type = other RNA
tcgtaggatcagcacaaagcgg

SEQ ID NO: 2247 - RNA, 22 nt, synthetic construct
  source 1..22: mol_type = other RNA
tcgtagtcgtaggatcagcaca

SEQ ID NO: 2248 - RNA, 22 nt, synthetic construct
  source 1..22: mol_type = other RNA
tctccatccctttgcttccttt

SEQ ID NO: 2249 - RNA, 22 nt, synthetic construct
  source 1..22: mol_type = other RNA
tctcctgacatgtctgggactt

SEQ ID NO: 2250 - RNA, 22 nt, synthetic construct
  source 1..22: mol_type = other RNA
tctgggacttggtttaggaaaa

SEQ ID NO: 2251 - RNA, 22 nt, synthetic construct
  source 1..22: mol_type = other RNA
tcttacaccaaactcatctggc

SEQ ID NO: 2252 - RNA, 22 nt, synthetic construct
  source 1..22: mol_type = other RNA
tgaaagagccccacttggaagg

SEQ ID NO: 2253 - RNA, 22 nt, synthetic construct
  source 1..22: mol_type = other RNA
tgaattcattctcctgacatgt

SEQ ID NO: 2254 - RNA, 22 nt, synthetic construct
  source 1..22: mol_type = other RNA
tgacacacttgtggagttttac

SEQ ID NO: 2255 - RNA, 22 nt, synthetic construct
  source 1..22: mol_type = other RNA
tgacatgtctgggacttggttt

SEQ ID NO: 2256 - RNA, 22 nt, synthetic construct
  source 1..22: mol_type = other RNA
tgagtttggtgtaagatgcatt

SEQ ID NO: 2257 - RNA, 22 nt, synthetic construct
  source 1..22: mol_type = other RNA
tgcatcttacaccaaactcatc

SEQ ID NO: 2258 - RNA, 22 nt, synthetic construct
  source 1..22: mol_type = other RNA
tgccagatgagtttggtgtaag

SEQ ID NO: 2259 - RNA, 22 nt, synthetic construct
  source 1..22: mol_type = other RNA
tgctgatcctacgactacgaaa

SEQ ID NO: 2260 - RNA, 22 nt, synthetic construct
  source 1..22: mol_type = other RNA
tgcttccttttcctaaaccaag

SEQ ID NO: 2261 - RNA, 22 nt, synthetic construct
  source 1..22: mol_type = other RNA
tgctttacaaatgcatcttaca

SEQ ID NO: 2262 - RNA, 22 nt, synthetic construct
  source 1..22: mol_type = other RNA
tggaaggcggtttggattttat

SEQ ID NO: 2263 - RNA, 22 nt, synthetic construct
  source 1..22: mol_type = other RNA
tggagaaggaccaagtacagcc

SEQ ID NO: 2264 - RNA, 22 nt, synthetic construct
  source 1..22: mol_type = other RNA
tggagttttacggctgtacttg

SEQ ID NO: 2265 - RNA, 22 nt, synthetic construct
  source 1..22: mol_type = other RNA
tgggacttggtttaggaaaagg

SEQ ID NO: 2266 - RNA, 22 nt, synthetic construct
  source 1..22: mol_type = other RNA
tggtaaatttcgtagtcgtagg

SEQ ID NO: 2267 - RNA, 22 nt, synthetic construct
  source 1..22: mol_type = other RNA
tggtccttctccatccctttgc

SEQ ID NO: 2268 - RNA, 22 nt, synthetic construct
  source 1..22: mol_type = other RNA
tggtgtaagatgcatttgtaaa

SEQ ID NO: 2269 - RNA, 22 nt, synthetic construct
  source 1..22: mol_type = other RNA
tggtttaggaaaaggaagcaaa

SEQ ID NO: 2270 - RNA, 22 nt, synthetic construct
  source 1..22: mol_type = other RNA
tgtaagatgcatttgtaaagca

SEQ ID NO: 2271 - RNA, 22 nt, synthetic construct
  source 1..22: mol_type = other RNA
tgtacttggtccttctccatcc

SEQ ID NO: 2272 - RNA, 22 nt, synthetic construct
  source 1..22: mol_type = other RNA
tgtcaagttccgctttgtgctg

SEQ ID NO: 2273 - RNA, 22 nt, synthetic construct
  source 1..22: mol_type = other RNA
tgtcaggagaatgaattcattt

SEQ ID NO: 2274 - RNA, 22 nt, synthetic construct
  source 1..22: mol_type = other RNA
tgtctgggacttggtttaggaa

SEQ ID NO: 2275 - RNA, 22 nt, synthetic construct
  source 1..22: mol_type = other RNA
tgtgctgatcctacgactacga

SEQ ID NO: 2276 - RNA, 22 nt, synthetic construct
  source 1..22: mol_type = other RNA
tgtggagttttacggctgtact

SEQ ID NO: 2277 - RNA, 22 nt, synthetic construct
  source 1..22: mol_type = other RNA
tgtgtcaagttccgctttgtgc

SEQ ID NO: 2278 - RNA, 22 nt, synthetic construct
  source 1..22: mol_type = other RNA
tgtgtgttttgtggattctttt

SEQ ID NO: 2279 - RNA, 22 nt, synthetic construct
  source 1..22: mol_type = other RNA
ttaatgccagatgagtttggtg

SEQ ID NO: 2280 - RNA, 22 nt, synthetic construct
  source 1..22: mol_type = other RNA
ttacaaatgcatcttacaccaa

SEQ ID NO: 2281 - RNA, 22 nt, synthetic construct
  source 1..22: mol_type = other RNA
ttacaccaaactcatctggcat

SEQ ID NO: 2282 - RNA, 22 nt, synthetic construct
  source 1..22: mol_type = other RNA
ttacggctgtacttggtccttc

SEQ ID NO: 2283 - RNA, 22 nt, synthetic construct
  source 1..22: mol_type = other RNA
ttaggaaaaggaagcaaaggga

SEQ ID NO: 2284 - RNA, 22 nt, synthetic construct
  source 1..22: mol_type = other RNA
ttcattctcctgacatgtctgg

SEQ ID NO: 2285 - RNA, 22 nt, synthetic construct
  source 1..22: mol_type = other RNA
ttcatttttaatgccagatgag

SEQ ID NO: 2286 - RNA, 22 nt, synthetic construct
  source 1..22: mol_type = other RNA
ttccgctttgtgctgatcctac

SEQ ID NO: 2287 - RNA, 22 nt, synthetic construct
  source 1..22: mol_type = other RNA
ttcctaaaccaagtcccagaca

SEQ ID NO: 2288 - RNA, 22 nt, synthetic construct
  source 1..22: mol_type = other RNA
ttccttttcctaaaccaagtcc

SEQ ID NO: 2289 - RNA, 22 nt, synthetic construct
  source 1..22: mol_type = other RNA
ttcgtagtcgtaggatcagcac

SEQ ID NO: 2290 - RNA, 22 nt, synthetic construct
  source 1..22: mol_type = other RNA
ttctccatccctttgcttcctt

SEQ ID NO: 2291 - RNA, 22 nt, synthetic construct
  source 1..22: mol_type = other RNA
ttctcctgacatgtctgggact

SEQ ID NO: 2292 - RNA, 22 nt, synthetic construct
  source 1..22: mol_type = other RNA
ttgacacacttgtggagtttta

SEQ ID NO: 2293 - RNA, 22 nt, synthetic construct
  source 1..22: mol_type = other RNA
ttgcttccttttcctaaaccaa

SEQ ID NO: 2294 - RNA, 22 nt, synthetic construct
  source 1..22: mol_type = other RNA
ttgctttacaaatgcatcttac

SEQ ID NO: 2295 - RNA, 22 nt, synthetic construct
  source 1..22: mol_type = other RNA
ttggaaggcggtttggatttta

SEQ ID NO: 2296 - RNA, 22 nt, synthetic construct
  source 1..22: mol_type = other RNA
ttggtaaatttcgtagtcgtag

SEQ ID NO: 2297 - RNA, 22 nt, synthetic construct
  source 1..22: mol_type = other RNA
ttggtccttctccatccctttg

SEQ ID NO: 2298 - RNA, 22 nt, synthetic construct
  source 1..22: mol_type = other RNA
ttggtgtaagatgcatttgtaa

SEQ ID NO: 2299 - RNA, 22 nt, synthetic construct
  source 1..22: mol_type = other RNA
ttggtttaggaaaaggaagcaa

SEQ ID NO: 2300 - RNA, 22 nt, synthetic construct
  source 1..22: mol_type = other RNA
ttgtgctgatcctacgactacg

SEQ ID NO: 2301 - RNA, 22 nt, synthetic construct
  source 1..22: mol_type = other RNA
ttgtggagttttacggctgtac

SEQ ID NO: 2302 - RNA, 22 nt, synthetic construct
  source 1..22: mol_type = other RNA
ttgtgtgttttgtggattcttt

SEQ ID NO: 2303 - RNA, 22 nt, synthetic construct
  source 1..22: mol_type = other RNA
tttaatgccagatgagtttggt

SEQ ID NO: 2304 - RNA, 22 nt, synthetic construct
  source 1..22: mol_type = other RNA
tttacaaatgcatcttacacca

SEQ ID NO: 2305 - RNA, 22 nt, synthetic construct
  source 1..22: mol_type = other RNA
tttacggctgtacttggtcctt

SEQ ID NO: 2306 - RNA, 22 nt, synthetic construct
  source 1..22: mol_type = other RNA
tttaggaaaaggaagcaaaggg

SEQ ID NO: 2307 - RNA, 22 nt, synthetic construct
  source 1..22: mol_type = other RNA
tttcctaaaccaagtcccagac

SEQ ID NO: 2308 - RNA, 22 nt, synthetic construct
  source 1..22: mol_type = other RNA
tttcgtagtcgtaggatcagca

SEQ ID NO: 2309 - RNA, 22 nt, synthetic construct
  source 1..22: mol_type = other RNA
tttgcttccttttcctaaacca

SEQ ID NO: 2310 - RNA, 22 nt, synthetic construct
  source 1..22: mol_type = other RNA
tttggtaaatttcgtagtcgta

SEQ ID NO: 2311 - RNA, 22 nt, synthetic construct
  source 1..22: mol_type = other RNA
tttggtgtaagatgcatttgta

SEQ ID NO: 2312 - RNA, 22 nt, synthetic construct
  source 1..22: mol_type = other RNA
tttgtgctgatcctacgactac

SEQ ID NO: 2313 - RNA, 22 nt, synthetic construct
  source 1..22: mol_type = other RNA
tttgtgtgttttgtggattctt

SEQ ID NO: 2314 - RNA, 22 nt, synthetic construct
  source 1..22: mol_type = other RNA
ttttaatgccagatgagtttgg

SEQ ID NO: 2315 - RNA, 22 nt, synthetic construct
  source 1..22: mol_type = other RNA
ttttacggctgtacttggtcct

SEQ ID NO: 2316 - RNA, 22 nt, synthetic construct
  source 1..22: mol_type = other RNA
ttttcctaaaccaagtcccaga

SEQ ID NO: 2317 - RNA, 22 nt, synthetic construct
  source 1..22: mol_type = other RNA
ttttggtaaatttcgtagtcgt

SEQ ID NO: 2318 - RNA, 22 nt, synthetic construct
  source 1..22: mol_type = other RNA
tttttaatgccagatgagtttg

SEQ ID NO: 2319 - RNA, 22 nt, synthetic construct
  source 1..22: mol_type = other RNA
caatccaaagcatcattagctt

SEQ ID NO: 2320 - RNA, 22 nt, synthetic construct
  source 1..22: mol_type = other RNA
attagcttaaaactttaaagag

SEQ ID NO: 2321 - RNA, 22 nt, synthetic construct
  source 1..22: mol_type = other RNA
agtcgtaggatcagcacaaagc

SEQ ID NO: 2322 - RNA, 22 nt, synthetic construct
  source 1..22: mol_type = other RNA
tacatcttttcctaggattctt

SEQ ID NO: 2323 - RNA, 22 nt, synthetic construct
  source 1..22: mol_type = other RNA
cccctaaaactaaaccacccct

SEQ ID NO: 2324 - RNA, 22 nt, synthetic construct
  source 1..22: mol_type = other RNA
gaaagcaaaaatagacacccct

SEQ ID NO: 2325 - RNA, 22 nt, synthetic construct
  source 1..22: mol_type = other RNA
aatccacaaaacacacaaataa

SEQ ID NO: 2326 - RNA, 20 nt, synthetic construct
  source 1..20: mol_type = other RNA
aaaaaaatgtacttggttcc

SEQ ID NO: 2327 - RNA, 17 nt, synthetic construct
  source 1..17: mol_type = other RNA
aaaatgtacttggttcc

SEQ ID NO: 2328 - RNA, 17 nt, synthetic construct
  source 1..17: mol_type = other RNA
aaaaatgtacttggttc

SEQ ID NO: 2329 - RNA, 17 nt, synthetic construct
  source 1..17: mol_type = other RNA
aaaaaatgtacttggtt

SEQ ID NO: 2330 - RNA, 17 nt, synthetic construct
  source 1..17: mol_type = other RNA
aaaaaaatgtacttggt

SEQ ID NO: 2331 - protein, 1503 aa, synthetic construct
MSKTILGLDLGSNSIGWAVVKAEVSESGEERLTGIEAAGSRILPMDAKLLSKFEKGNSVSQTETRRKARSARRRSERKKLRRARLLRTLRIIGWLPAHMASAIDDYGNIKRGSEPKMEWDGGNFMFTRAFEEMCAEFSARHPELKSVSHDWTVYYLRKKALREALTGQELAWVLLHFNQKRGYMPSRTDANIPAAKEGEKKEIVDVRVVGCKAAEAAKGRKATKAVTLIFDDGGEMNMPYYGTTPEEMVGRQMELLKTTKEGKTPTYTNPGENDWTFKKEKSKERITSAHKTVGEYLYDSLLEEPDVKLAGGKVTVLDRELYKSELEAILTKQAEFHDELKSPTLLAKCAEALYPNNPGHRAELMRHTMANLIMNDIILYQRPLKSKKSTIADCPFEYRTYMDKTGVEQVQKLKCAPRSHPLFQEFRLWQFVTNLRVTDEQTGNSEDILTDADRMKLFDALTPKSKVKAADVLKIVQKIIKPEESKKEKGAAPECHYRVNMVEGKDYPCYDMRAEIAACLTNKKSGPGLKAGDAYELITQTREEGDMTNEEYLWHISYSVTDPKEFEKAIKKWAETNGLPAEETARAFCALKPNKNYASYSLKAIKRLLPLMRMGRHWSFEAIDAKTRAKIEHFINGEEAEDMTPETMHKWAADKEDGGYDLKQAEESFQGLQPWKACMVVYGKLSGDEGLKWQTADDVREWLDKFPHGSLRNPIVEQVVLETMRVVADVWDKHGRPDEIHIEMARELKKTNAERAEMTRQNAQREEDNERIRKILRELASTCEDVKPFSPIQQARLKICVEGARLVAPAEEPKIEEIEKYKLWIKQNYKSPYTGESIELARLFTSDYEIEHIIPRSRYYDDSFNNKVICEAKVNQDKDNKMAMEYINAAQGKEVDLGGGRKVNILTPDEYVKRINDIYKNNSRKRENLLRTELPQDFNNRQMNDSRYIAVKVKELLNNAVRAEVGDDGAGSKNVVVCTGTVTDRLKQDWGVNDKWNEIILPRFMAMNEKVADKSDRNNRFIAKSNGHLIPTVPTDMLKGFNKKRIDHRHHAMDAIVIACASRAMVQFFSNQSSNKGGNMFENLRKSLCHKDANNVWVVNMPWETFPTDVKNALESITVSIKHRQRIVTRTTNHYTVTKGGRREVRKQATYAIRNSLHQETVWGLVNLQQKEQMSLKDAIKELRTFLSARIDDPQMRPKSQIVCKPLRRRISQLITAGKTDKEILALLDAESDVWSEEIKSGKVSVYTWSKDGGTRICATRFLSSLSDLFSKLTDEEKIKNKIASITDTGIQKILFNHLAQWQGGAATAFSPDGIKWMNENIQTLNGGKPHKPIYKVRRTETSDAKQQIGTNGNRSSKYVEAAKGTNLFFAVYVDDKGKRTFSTTPLRTVISRQLQGQSPVPETIGDNERLCFYLSPNDLVYVPTHGERYIEDRNRIYKFVSCFENRAWFIPAYVAKVIVDKSEFGSQNKIEVIDGVSIKNVCLPVEVDRLGNVTLKKIGEDD

SEQ ID NO: 2332 - protein, 1357 aa, synthetic construct
MNNKEYFLGLDIGTGSVGWAVTDTQYNLIKINRKYAWGAVLFDTAKGAEERRVNRCARRRYQREKQRINLLQELFEEEIYKVDSGFFHRLNESRYVYADKRDEKGEKPELPYSLFVDENYTDVDYHREFPTVYHLRKALMTEDRAFDVRLLYLAIAHIIRNRGHFLSNMGMDEVNLDFSKIFGDLMNCWKENMEDESRNSVLELENETIENIEKIMKNSELTKTAKKQKILEELSGFSKEFKELIALITGGKVSLAKLFDKKEYDTLEIDKICFDEASFEENEEIYATNLDDYFEIITKAKAVYDWMILSNIFKDDKSGYLSCAKVADYEKHKRDLKNLKEAIRNDSIGDEEDKRNLYKQTFGVPKKGEENYSKYIGMTASKGSKFVIDGAKCSKYDFYKFVKKNIIPKLKDGELKEYIEKEISLESFMPKTRVKENAIIPYQIHAKELKKILECAEAYMPFLKERDDSGKTVSEKIMMLLTFRVPYYVGPLNTASSQAWVKRNGTGRVTPWNFETMINVDLSAEKFIERMTSKCTYLKNEKVLPKSSLVYEEYMVLNELNKLQIKSEPISVELKNDIYHDLFERKLKVTLKKLVDYLKREKGYTDITKEDISGIDIDFKSSLKSYHAFKREFTDVNLSESEKEDIIKDMTLFGAEPKLLKKRLYAKFPDYESQLNSLIKSLNCNGWGRLSYKLLNGIAVEIPGQGMVGTVLYQLRNTNNNLMEILEKSGSPYAKLIEEENKTDDSHKINYELVKELYVSPATKRQIWKAIQVVEEISHAMGHPPKRLFVEMAREHMESKRSITRKNKLLDLYKSIKNEKELYEELKGQPEDKLRSDKLYLYYTQFGTCAYTGKKIELSELFNNNLYDIDHIYPQSKTADDSLDNRVLVCKDSNGYKSDVYPIDSDIQKKMWNIWYLWYSKGLISKEKYKRLTRTSELTNDELTGFINRQLVETRQSTKEIMKLMRQLLPDTELVYSKAGNVSRFRQKYKILKVRELNDYHHARDAYLNIVVGNAYHLRFTKDIRNYFMKYGTYRTYNLKKMFEKDITFQEEVAWRAGERGTIQTVLRFMNCDKVLVTRQTFERKGALFDVQPKKKGEGQVPIKSGINNERLAVIEKYGGYNGATISYFTLIEGLKNNKNKKRYIIPVPLYLCHKIEKDELYAKQFFEKESKLSNIRIIRKILIQTLMIDEGFKMRLAGKSGTQLIFHNSNELSLNKKHFKCLKEIEKFILDRKDKPDATINEKSELAGNQMLDIYNIFIDKLMNSVYSKELGKHGEFLNNGLEQFNKLSLEDQAIQLHELLKFFQCTPEMPDLSRVGGSKSIGAIRSSMDVTKRSKLAIIHQSVTGIYEKIERINE

SEQ ID NO: 2333 - protein, 1016 aa, synthetic construct
MKKILSLDIGISSIGNAVVELDDENFYGKILDAGVRIFSAAEQPSGDSLAAPRREARGARRRISRRSSRLYNIKKYLILNNFITQEQIENLYCSNKQIKDVWTLRKEALYRKLNNEEFYRILMHIAKRRGFKSIRKSEEAKKEGDLLKAIKQNYQEFENGQYKTIGEMFAEKDIKRNKREKYNNSIPRDLLQKEIEIIFETQRKLGSPLAKEETENFYLQTAFYQRPLQSMEDKIGYCSFEPDEKRAPKCAYTSEIFTAATKLVNLSITDELGECRVLCGDEIKQIIELAHKNTKVTYKQLKKELCLEDNILFNGLNYNKKDKNPEDSTLIELKNYHLIKKSIVNDKNLGKVYFEAIKYDKDLFNNIATVLTCEKSDESVIARMKEYFIDDKIIACVKDLSMSKTMHLSLKAMEKILPYMLEGYKYNEACELAGYNHHSISKNKTKQNFLPVLPQEELTTNPVVNRAISQTRKVVNSLIKRHGTFDYIIIEMARDLSKSFDERRKIKKAQEDFQNQKELARKRCIENGLNPDYPKSNLLKFRLWEEQGGYCIYSGKYIDPRKLSDQDYTDVDHIIPYSKSFDDSLNNKVLCLSDENRQKGNKIPYEYIGESKWYDFVQRIKTYNLKSAKYNRLIRKSYESEGFKSRNLNDTRYITKFIKDYIKENLDFGNNLKVETRNGSLTAFLRTQWGLIKNREENDRHHALDAIVLACSTQGMVQYLSTVSAKIENYNYTKDKKPRFKRPWATFKEDVELAISKIFVSRALRASVSGQLHDATIRSPKHLQDGFTVLKTPLEKINLQTLEKMYDKERNIKIYNLLKERLTKFNNDPKKAFEEPVYMPMSEEKLKQGQKPHLIKTIKIKDNSISGIKVHNGFAQNTSMPRVDVFTKKNKKGKNEYFLVPIYIADFGGELPNKAISTGKNRWIEITDDYTFCFSLYPNTLIAINPTGKPEDEFLGYYKGCDITTGTIKLDSHDRTIKDKRISTKTAAYIKKYQVGVLGDYHEVKHEKRLKLKGPK

SEQ ID NO: 2334 - protein, 1097 aa, synthetic construct
MEYTIGLDIGVASVGWAVLADDSQGEPCHIQDLGVRVFEAAEHPQTGASLAAPRREARGARRRIRRRRHRKERIKALLVKGGVITQEEMDRLFQNSGFAQDVYTLRAEGLDRCLTPEEWTRVLLHLSQRRGYRSNSTAEAAKDKETGVLKQALAGNQALMQEKGYRTVGEMFCRDEKFLFVGPDGNLWRKTHNTPGDYSFTITRDMIQQEAAALFAAQRNYSNPYADEALEEQYTKILLSQRHFDQGPGGNSPYGKGDLRGFCTFEPQERRAFKATYTFEYFKLLQDINHIRILSPSEPTRKLTQPEREQLISLAMESPSLDFARVRKALNLPPECSFNVVPYERDKEEAEKKRKFPQMQSYHTLRKALNTVEKNYITHLTYAQLDEIGTILSLYKADDKRQEGLEALGLSQQVIDALLPLSFSKAGNLSLTAMKKLIPFLEQGINYDEACREVYGDHRRMAGGQRYRYLTLNKELWDSGALDAITNPVVLRALSQTTKVLNAIIRRYGPPQRICIELAREMSNNFDQRNKIQKRNEENRAKNEKLMEQIQKLKNARPTGQDLVKFRLYQEQDGMCLYSGTQLDMERLFEPGYVDVDHIIPYSISFDDSNRNKVLVLAKENRQKGNRIPMEYLASDPERRERYITLVERYVRDYRKRQKLLKEKLTPEDCQGFKERNLVDTQYITRTIYNLLKDYLEFSPSASKTPVRAVNGAVTSHMRRMLGLTKHREDGDLHHAMDAAVVAVTTPGMIQKISRYAKRRELGQKVVGKYVDPETGELLSQADFDKKYAPEFPEPYDGFRQELLARLSPDPDTRIRELHLPHYDDGGEIRPVFVSQMPRRKVTGPAHAQTIRSGKKPGYALSKKALTELKLDKNGEIAGYYNPKDDVLLYNALKARLQAYNGDAQKAFAQPFHKPKKDGTDGPVVNKVKILEKSSLNVSACGGIADNGGMVRIDVYRVPEDGYYFVPVYTADVVKGVLPTKAVVALKGYDFWKPMEAQHFLFSLYPGDLVRVVAKKPINMKLKNKNAKGELELLRKEWLGYYVGANIFTASIAISTHDRKYVRDGIGVKTLLLLEKYQVDPLGSYQKVHLPEKRQDF

SEQ ID NO: 2335 - protein, 1092 aa, synthetic construct
MAYGIGLDIGIASVGYAVVALDTDENPWGIIRMGSRIFDAAENPKDGASLALPRREARSTRRRLRRHRHRIERIKNLFLRSGLLTGTDLDCLYQGQLEDIYALRVKALDEPVGKKELARILLHLAQRRGFKSNRKAESKEKEAGLLKAAVSENEKRMAENHYRTAGEMFLKDPAFSQYKRNKGGVYLTTVQRSMIAEEADIILQRQSELGNKIITRDFKEEYFSILLSQRQFDEGPGGNSPYGGNQIEKMIGICTFEDGTNGFPAEPRAAKACYSFEYFNLLQKVNHIRLLYKNESRFLDDGQRKKVIELAKTKADLNYSHIRKELGLGEEIKFNMLVYNADDIEKKTKFNFMPAYHQVKKALNAVAKGHIESYSTELLDEIGRILSTYKGDEKRTEELIKAGIAIPDVDELLKIGGLSKFGHLSLKALRKIIPFLEQGMSYDKACEAAGYNFRAHNKEKSMYLPAKAEELQDITNPVVRRAVAQTIKVVNAIIREQGESPIYVNIELAREMAKDFKERAKLTKENHENQAENERLLDRIRKEFGKSNPTGMDLVKLKLWKEQDGISPYSRKTIEVTRLFEPGYVDVDHIVPYSISFDDTYKNKVLVMSSENREKGNKLPIQYLAAKFGKDAVEAFKVWVVNSVKNYPKRQKLLKEKITEEDITGFKERNLQDTKYMARVLYNFINDRLLFAESEIGKKKRVRAVNGAITSYLRKRWGINKVRENGDKHHAVDALVIACTTDKMIQEISGYARGQELEYEPMDKESLLVDKSTGLILKRFPYPWEDFRKELMARMSDQPAEALQKLRLLYYQDKDITAIKPIFVSRMPRHKVTGAAHKATVKGARHLDEGIALYKTDLVNLKLDKNTGEIVDYYNPESDRLLYNALKTQLQKYNGDGKKAFAEPFYKPKADGTPGPLVKKVKCFEKTTLNVLVEDGTGAADNDSMVRVDVFKVEGDGYYLVPIYVADTLKETLPNKAIVAHKQYSQWKEMKEEDFLFSLYPNDLIRVQNKKDMVFTKSQKESNLPENYIAKDIIAYYKQTDISAGAIKIISNDDSYSLRGLGVKTLQRIEKYQVDVLGSYYKVKTEKRQLFH

SEQ ID NO: 2336 - protein, 1394 aa, synthetic construct
MSKILGIDLGTNSIGLAIRDTDKGETFVEQVDFFSSIIFKSGVGSGQAGEFSYAAERTKKRSIRRLYQSRKYRIWTTLALLIENGYCPLSIEDLDKWRRYDKEKGLKRQYPIEAIQFEQWIRLDFDGDGKPDYINPYELRAEIMQKQFDFNEEINRYKLGRILYHITQRRGFKSSKGETLKELSENEINEDLDLSVALQKSEEKKSQKLKDFMKEHNIPTVGWAFYELTKRGIRIKESEYQAVRIQYKEEIQKIFEFQEGLDTTSDFYKHLMSEKKGEGTIFYKRPLRSQKSKVGTCTLETGKSRCPISHPEFEEYRAWSFINNIKYRTSTTAEWKTLPLNLKQELFKDKFLRTKSYFKFEEIKNWLSSKLCLQLEYTNKKETSTINYKDKTNVVGCPISARLKNILGEDYKQWKFNSDKERTNRKTGEVHRITYDYLDIWHICFSFDEAEFVEEFAKCTLKLDDKQAKKLCTLHNNIQQEYASLSLKAIRNINPFLQKGLIYTDAVLLAKLPEIFKDKWNEVENDIVAAIDDIIKENRYEKGILDIVNDLIANYKSLDYGERFAEHNTEYILQSQDYTDIESKLKGHFGERTWNAKPCEEQEQIRKDVRELYQIFFGSSSRGYFKQPKVSESLAEYLKKQYTYLNDDDLKKIYHPSMIEFYPKVKPTLLDDNKYVKLLGSPVIGALKNPMAMRILHTLRTQINQLIKEGKIDEYTKIVVETAREVNNTNKRWAIEEYQRKQEEENKEVEKIIRQYYQKDNISDDEIKKAKILLDQFDVEKDNKQEKKQDTQSDKLSDTWSKVKSNNIKRYKLWLEQNCCCMYTGKVIRISELFDNDKFDIEHTIPRSISFDDSLSNLTICDSHFNRSIKKNQIPTQLDNYNEIKSRLELWKQKVKSLKERVEYWKEQSKISQTKDRKDQCIKQRLLWQMELDYWEKKLASFTIKEFIDGFRNNQLNDTRIITKYAFHYLKTVFEHVSVQRGEITSNFRKIVGIQKEDEKKDRSNHSHHAIDAAILTLIPSAKQRNRILETFYQMKESKETNNKDKLEKTTKELEKAKRAALIPNAVAAIKDHIEQNIFVNHISKDQTLTPAKRRKRIRGKIDKNKQWIITGDCIRGSLHKDSFYGCILIDGKKYFVIRRALKYKANDKDKGFKTWNELENAIVDKALYRRLVKPFCQEGAEEPSIDFKTVMLEKGGLYDNGIKVRHIRCYTSVKNPLQIKKQTYKSKQGYKNYYYAEVGDLYTMCKYENKKTGEIVYQPYNLFEVAANHKITHEFIPSKYDDKVLTQQLVKGDMLLIYKDNPNELFEMDNVQLSKRLYVIDGFERKSCLTKLIRSSNAQQDKELGKGESIKDFNNLPQKIRQSINKLHYLLRGIDFKIINGRIEFLNKTKYYD

SEQ ID NO: 2337 - protein, 1072 aa, synthetic construct
MYRLGLDIGTTSVGWAVLNTNNDAEPNRIIDLGVRIFDAAENPKDGSSLAAPRRDARGARRRNRRHRHRMERIKALLVNSSVLTKEELKDLYNKKELIDIYQVRYEALDRALTNEEFARLLIHIAQRRGFKSNRKNEDKKSDSGKLVTATTENTEYMASKGYRTVGEMLYLDEKFAHNKRNKGGDYSNTFLRSQLTEEVVIIFNQQKLFGNRFADDVLLTKYTEILLSQRDFDQGPNEPSPYAGNQIEKMVGECTFEKGEKRASKATYSFEYFNLLQKINAIRIQSPEGKRTLTADERNRIVELCHKTEKVEYRHLRNAIPLESYEQFANLSYGDKTTEEVEKTKFQYLNAYHDMRKVFDKLSKGHISNISVKQRDAIATALTYYKTDEKIISALADIELSQEELNVVLELKNYSKFGNLSVKALNKIIPYLEQGYTYDKACGLVGYDFRGHTDSYKSKYLPKLPDDIYDITSPVVKRAVNQTIKVVNEIIRRYGSPAAVNIELAREMSRSFNDRKEIEKAQKENADNNQKIREEIKDTFKILSPTGQDIIKYRLWKEQQETCLYTNSPIKAELLFSPGYCEIDHIIPYSISFDDSYSNKVLVMAYANREKGNRLPLQYVKSKDDFIGLVNAFIKNKAKKQKLLKEYISVEDENQIKQRSLQDTQFITRFMLNYIRDNLEFDSAYSGKVKVQAVNGAVTAYMRKRWGISKFREDTDKHHCIDAVVVACITPGIIQKVTRYSKRKENYYNDRDIELNNERFPLPWHEFKDEIDARTIANPAALLAEINLPNYMGVDIEKIRPIFVSRMTKKKTSGQAHKETIRAWRDVTIDGRTEKKTVTKTALQNLKLDKNNEIVNYYNPSSDRLLYELLRDKLIAAGGNGKKAFPDGYILKPAPKGGVQSKVQKVKIYDTSSLNVSVNDGVAANGDMVRIDLYKVEGDGYYFVPIYVADLIKEKLPNKASVAAKSYAEWKEMKDEDFLWSVYPNDLLYIEHKKEMKFTKVFKDARINNEMFANKVFVYYNSADISTGSIKIITDDNGYMIRGLGIKTISNIQKYHVDVLGNKYKAEKESRK

SEQ ID NO: 2338 - protein, 1091 aa, synthetic construct
MNYIIGLDIGITSVGYAVLMLNDNDIPCRILKMGSRIFEIAENPKDGSSLAAPRRINRGMRRRLRRRRFRKEQIRNLIIQNNIMTNDEIISIYNSGKELTDIYKIRCEALDRELDKEEFVRLLIHLSQRRGFKSNRKVDASDSKSEAGKLLNAVKTNKTLMEEKGYRTIGEMLYKDECFADVKRNKADDYSNTFARSEFEAEINAFFDAQQKFGNEYANDEMRDSYLKIYLSQRAFDEGPGGNSPYGGNQIEKMLGKCTFEPDEFRSVKAAYSFEYFNLLTKVNSLKLITPEEKRFLTKEEKDKIINLAFSKKTISYASIRKELGILADTYFNISYGKGDITPEETEKKTKFTYLNAFHVFRKAYGDVFLNWSKDKKNSLGYALTVYKNDSKIVDYLNNKGFDKAEIDIALTLPSFSKTGNLSIKALDKLIPFLEQGMLYNEACAAAGYNFKNDDTSKRKFLPANEEDAPELGDIRNPVVRRSVSQTIKVINAIIRKYGESPTLVNIELARELSKAKKDRDKIEKNQKDNRSRNEAIVEELKNTFHILQPTGQDVVKYKLWKEQDGICPYSLKSISLDKLFDVGYTDIDHIIPYSVSFDDTYNNKVLVLSSENRQKGNRLPMEYLKGKKRDEFWLWVDNSNLRSRKKKNLLKEQITEEDISGFKKRNLQDTQYISRFLLSYLKKYLELQPNGSAIKNTIKAVNGAATAYVRKRWGINKIRENGDIHHAVDAVVIGCITNPMIKKISEYSKYRELEFVNPHTDEILDIDTRTGELVNRFPMPYDWFRDEFIMRTSSDPTRVLHEKPLPNYATDEEVSPIFVSRMPKRKVSGAAHKDTIRRKYVNEVGLEYTVSKVPLSSLRLKNGEIEGYFNPSSDMLLYNALKSRLAMYDGDGKKAFADSTEPFRKPKHDGTDGPIVKKVKIQNKATLSVQVQNKTAIADNGSMVRVDVFFVENEGYYLVPVYVSDTVALDLPNRAIVGGKPYSKWKEMDNDNFVFSLYPNDLIKVKSKRDMKFNLVNPDSTLAKNYTARESMLYYKGTDISTAAITAINHDNTYKLRGLGVKSLLSIEKYSVDVLGNKTKVNKEKRMGFV

SEQ ID NO: 2339 - protein, 1348 aa, synthetic construct
MSIKSDYFLGLDIGTDSIGWAVTDPEYHILRRKGKALWGIRLFDAANTAAERRTFRTSRRRIQRRRQRIRLLQELFAEEMVKLDPGFFQRLSDSAFWQEDKQEQQIYSLFTCENYTDVDYYREYPTIYHLRSALIQEKKEFDLRLLYLALHHLMKHRGHFLFNGSINNVTSFHTTFQTFADCLYDEFDIELECDSEDRFAEILKDKHARKTGKCSELEIICHIEKSNKQLKELFKLITGMKASLSVVFGDDELAEIEHNKISFSESSYDEVRLALEDEIQERTGILDIFHAVYSWAILADILEGGEYEGNSYLSVAKVSTYKKHGDDLRLLRTLVREYCPDHYKSFFSVSGKENYCAYAGTLKKNGKKQPIKRCSQEDFYKALKKLLNQMPTEQPEVKDIFIEIENGTFLPLQVSKDNGVIPYQVNKMELEKILQNAEEYLPFLKNIDEECGKTVSKKIIDLFEFRIPYYVGPLNTAKGENCWMVRKEAGRIYPWNFDEKVDRDQSAEKFIRRMTNQCTYLIHEDVVPKNSLLYSEFMVLNELNNVKIRSEKLPVELKQAIVLDLFKKQKQITGKKLLNYLNANGYDVKKEDLSGFDGNFKSSLSSYLTLKKVFGEELDKYSVQQMAEDIILWITLYGDDQKMLRRVIRKHYEQQLSEEQILSLSKLKFQGWGRLSRRLLSEMEGVDCETGECMTVMQGLRNTQNNLMQLLSQQFSFMELIEEENGNYYVDEITYDNLVKDMVISPSVKRAVWQTVQIVEEIKGVMGCQPKKIFVEMARSDEEKKRTVSRKDRLLEAYDAIKDEARQWQEELQKYSDGDFKAIKLYLYYTQMGQCMYTGRKIDLSQLNDATVWDRDHIYPQSKTKDDSLDNLVLVDRSVNAKKSDGMLSPEIQQRMRATWKYLKEKKLISEKKYERLTRVSPLTDEELAGFINRQLVETRQSSKAVATLLKRVYDEAEIVYVKAEAVSNFRRDNLDYIKVRDLNDYHHAKDAYQNIVVGNVFHEKFTSNPLRWLKNNPNTKYSLNQMFNFDLEKNGVVIWKRGKAGSIKCVEETLKRNDILFTRYAFCNKGGFFNQMLTAAPEDKTKAKGLVPIKKGMETWKYGGYTSVTPSHFMLVASKDKKGKEIRTIETVPLYRWKEFKENPDALLQYCREFYGLKEPKVLIPCIKKNARLVVNGFPMHLKGSTGKQLILQGAVQLCLNNENIKYLKKVTKYLEYNAQRRDKRTLLEVREVTGINKEENIQLYDVFVDKLSNTIYQYRPANPKDNLIKGREKFIELGLAEQCVVLGEVLHLFQCKPLTSDLTLIGGSPNTGTIKITKTISNCNVVKLLSQSIAGVKVREINLLII

SEQ ID NO: 2340 - protein, 1109 aa, synthetic construct
MGKLVLGLDIGITSVGYGVIDIDNNKFVDYGVRLFKEGDSNDNEKRRSYRSGRRLRRRKKNRLDDMKSLLLSAGILTKDYKPLNNIYEIRVKGLTEKLTNNELAAALLHITKNRGTTVEALETADADKEAAGTKDVLAKNAKDLEQFEYVCKVQLYRLEKYGNIRGTENNFNTSDYVKEARAILKCQDIDVELSESIVNIISRRREYYEGPGSEKSPTKYGRWIEKGAEPIDLIEKMRGKCSIYHDELRAPKSSYSAELFNLLNDLNNLSINGEKLTQNEKEIVIEEVNNNGKITIDKLKKLLNINDSKDVVEGFRINKSNELLLTNMAMYDQFKKIFDKHKEDAYQRDKYIIDQIAEINTAKKGIKERCDAIEKQFPNFDYNLIRDLAEMKKMTQYHSLSLKAIREINKEMIKSPYNQMQAIHELGLQHYRKSYKGMKKIQVDEEAILSPVVKRAQRETFKVINRLREIYGEFESIVVETTRDKNSKEKKERINKTQKYYEDRNKKVDELLKERGYNPDTINNKTKMKVKLYLDQNGKSAYTMTPLKLNLIITNPHAYEIDHIIPLSISQDDSFNNKVLITHEENQVKGNKTPIYTYLNNQFKNCDINKYKESVKNNHNFSRKKKFYMLYEKDITKYSNMKEFIARNLVDTSYASRVVLNTLTSYFRDNDISTNVHTIRGSATSLYRKRIGLKKDRDKDFLHHAIDALIVASIKKQSIFRKYLIKYNLSELYNEKTGELIKVEEDSKVIDPVFIEFISNLKTIYEQSYQYYNGYISRNKMKFKPIKISHKVDTKPNRKISDETIYSTRNVNGVERVVKKVKDIYDPKFDKLTNDIINNQYHNKWIMAEKDEQTFEIIKSIVMAHFNTYKEDKDIYKSKSKKGVTTWSLKGSNNPLSQFKEEHGKIRKYSKKGNGPEITSMKYYEDELGNHVNITKKYNVDNKNVVLLQISPYRTDFYVSPKGKYKFVTIRYCNVFYKESNKKYLIDKKWYEEEKKKKKIDDSYQFVCSLHHDEILGVKLEDGKPYIYDESNENDEGLKRYHKGQYEILKFTATNDDKKNIIEIKPTYTYCQKQLKRSCGTFIKLTKFATDVLGNMYEVKDNVLKLEFD

SEQ ID NO: 2341 - protein, 1370 aa, synthetic construct
MTKVKDYYIGLDIGTSSVGWAVTDEAYNVLKFNSKKMWGVRLFDDAKTAEERRGQRGARRRLDRKKERLSLLQDFFAEEVAKVDPNFFLRLDNSDLYMEDKDQKLKSKYTLFNDKDFKDKNFHKKYPTIHHLLMDLIEDDSKKDIRLVYLACHYLLKNRGHFIFEGQKFDTKSSFENSLNELKVHLNDEYGLDLEFDNENLINILTDPKLNKTAKKKELKSVIGDTKFLKAVSAIMIGSSQKLVDLFENPEDFDDSAIKSVDFSTTSFDDKYSDYELALGDKIALVNILKEIYDSSILENLLKEADKSKDGNKYISNAFVKKYNKHGQDLKEFKRLVRQYHKSAYFDIFRSEKVNDNYVSYTKSSISNNKRVKANKFTDQEAFYKFAKKHLETIKYKINKVNGSKADLELIDGMLRDMEFKNFMPKIKSSDNGVIPYQLKLMELNKILENQSKHHEFLNVSDEYGSVCDKIASIMEFRIPYYVGPLNPNSKYAWIKKQKDSEITPWNFKDVVDLDSSREEFIDSLIGRCTYLKDEKVLPKASLLYNEYMVLNELNNLKLNDLPITEEMKKKIFDQLFKTRKKVTLKAVANLLKKEFNINGEILLSGTDGDFKQGLNSYNDFKAIVGDKVDSDDYRDKIEEIIKLIVLYGDDKSYLQKKIKAGYGKYFTDSEIKKMAGLNYKDWGRLSKKLLTGLEGANKITGERGSIIHFMREYNLNLMELMSASFTFTEEIQKLNPVDDRKLSYEMVDELYLSPSVKRMLWQSLRIVDEIKNIMGTDSKKIFIEMARGKEEVKARKESRKNQLLKFYKDGKKAFISEIGEERYSYLLSEIEGEEENKFRWDNLYLYYTQLGRCMYSLEPIDISELSSKNIYDQDHIYPKSKIYDDSIENRVLVKKDLNSKKGNSYPIPDEILNKNCYAYWKILYDKGLIGQKKYTRLTRRTGFTDDELVQFISRQIVETRQATKETANLLKTICKNSEIVYSKAENASRFRQEFDIVKCRAVNDLHHMHDAYINIIVGNVYNTKFTKDPMNFVKKQEKARSYNLENMFKYDVKRGGYTAWIADDEKGTVKNASIKRIRKELEGTNYRFTRMNYIESGALFNATLQRKNKGSRPLKDKGPKSSIEKYGGYTNINKACFAVLDIKSKNKIERKLMPVEREIYAKQKNDKKLSDEIFSKYLKDRFGIEDYRVVYPVVKMRTLLKIDGSYYFITGGSDKTLELRSALQLILPKKNEWAIKQIDKSSENDYLTIERIQDLTEELVYNTFDIIVNKFKTSVFKKSFLNLFQDDKIENIDFKFKSMDFKEKCKTLLMLVKAIRASGVRQDLKSIDLKSDYGRLSSKTNNIGNYQEFKIINQSITGLFENEVDLLKL

SEQ ID NO: 2342 - RNA, 98 nt, synthetic construct
  source 1..98: mol_type = other RNA
gttgtgattcgcttccgaaagcaagcgaatcacaataaggattattccgttgtgaaaacatttaagtcgggcctccttcggttggctcggcttttttt

SEQ ID NO: 2343 - RNA, 89 nt, synthetic construct
  source 1..89: mol_type = other RNA
gtttgagagtaatgtaggaaattacattacaagttcaaataacgatttaatcgaaaccacctttttaggtactgcggttgcagtttttt

SEQ ID NO: 2344 - RNA, 96 nt, synthetic construct
  source 1..96: mol_type = other RNA
gctatagtttcctttcgaagaaattcgaaacgttactatagtaagaaattttcgaaaagttctgcctaatactattatgtattaggcatctttttt

SEQ ID NO: 2345 - RNA, 107 nt, synthetic construct
  source 1..107: mol_type = other RNA
gttgtagttccctaatgttgaaagacattaggttactgcgatcaggcagtatgcctcagagctccgccctaaccacgttttgtggttggggcgtctttgcatttttt

SEQ ID NO: 2346 - RNA, 100 nt, synthetic construct
  source 1..100: mol_type = other RNA
gttgtagttccctgttaatgaaaattttcgggttactatgataaggtagaacaccgaaaagctctaacgccttgccatttggtgaggcgttatctttttt

SEQ ID NO: 2347 - RNA, 98 nt, synthetic construct
  source 1..98: mol_type = other RNA
gttgtgaattgctttcaaagaaatgtgaaagcttttcacaataaggctataagccacagatctttctaactcctgcgtactccgtgggagtatttttt

SEQ ID NO: 2348 - RNA, 105 nt, synthetic construct
  source 1..105: mol_type = other RNA
gttgtagttccctatttatgaaagtaaataggttactacaataaggcccttgcgcaagcatggtgccgcaactggaaggtgctgtgcgagtcacggcactttttt

SEQ ID NO: 2349 - RNA, 99 nt, synthetic construct
  source 1..99: mol_type = other RNA
gttgtagttccctatttgtgaaaacaattaggttactatgataaggtagtataccgcaaagctctaacgccccgtctttgacggggcgttatctttttt

SEQ ID NO: 2350 - RNA, 107 nt, synthetic construct
  source 1..107: mol_type = other RNA
gtttgagagtagtgtaagaaattacactacaagttcaaataaaaatttattcaaatccatttgctacattgtgtagaatttaaagatctggcaacagatcttttttt

SEQ ID NO: 2351 - RNA, 87 nt, synthetic construct
  source 1..87: mol_type = other RNA
gttttgttaccatatggatgaaaatctatatgacctaacaaaacaagggtttatcccggattcggctcctttataggagcctttttt

SEQ ID NO: 2352 - RNA, 106 nt, synthetic construct
  source 1..106: mol_type = other RNA
gtttgagagttatggaaacatgacgagttcaaataaaaatttattcaaaccgcctatttataggccgcagatgttctgcattatgcttgctattgcaagctttttt

1. A method of excising an intronic trinucleotide CTG repeat expansion from a Transcription Factor 4 (TCF4) allele in a cell, the method comprising
introducing to the cell a composition comprising:
at least one CRISPR nuclease, or a nucleotide molecule encoding a CRISPR nuclease;
a first RNA molecule comprising a first guide sequence portion, or a nucleotide molecule encoding the first RNA molecule; and
a second RNA molecule comprising a second guide sequence portion, or a nucleotide molecule encoding the second RNA molecule,
wherein a complex of the CRISPR nuclease and the first RNA molecule affects a double strand break upstream of the intronic trinucleotide CTG repeat expansion and a complex of the CRISPR nuclease and the second RNA molecule affects a double strand break downstream of the intronic trinucleotide CTG repeat expansion,
wherein the first guide sequence portion comprises 17-50 nucleotides containing at least 17 contiguous nucleotides in the sequence set forth in any one of SEQ ID NOs: 1216-2325 or 46145-47292 and the second guide sequence portion comprises 17-50 nucleotides containing at least 17 contiguous nucleotides in the sequence set forth in any one of SEQ ID NOs: 1-1215 or 45057-45092.

2. The method of claim 1, wherein the first guide sequence portion comprises 17-50 nucleotides containing at least 17 contiguous nucleotides in the sequence set forth in any one of SEQ ID NOs: 1216-2325 and the second guide sequence portion comprises 17-50 nucleotides containing at least 17 contiguous nucleotides in the sequence set forth in any one of SEQ ID NOs: 1-1215 and wherein at least one TCF4 allele in the cell comprises a heterozygous SNP at the rs34071688 position.

3. The method of claim 1, wherein the first guide sequence portion comprises 17-50 nucleotides containing at least 17 contiguous nucleotides in the sequence set forth in any one of SEQ ID NOs: 46145-47292 and the second guide sequence portion comprises 17-50 nucleotides containing at least 17 contiguous nucleotides in the sequence set forth in any one of SEQ ID NOs: 45057-45092 and wherein at least one TCF4 allele in the cell comprises a heterozygous SNP at any one of the positions selected from the group consisting of rs746872826, 18:5558615, rs879522127, and rs1268568114.

4. The method of claim 1, wherein the first guide sequence portion comprises 17-50 nucleotides containing at least 17 contiguous nucleotides in the sequence set forth in any one of SEQ ID NOs: 1216-2325 and the second guide sequence portion comprises 17-50 nucleotides containing at least 17 contiguous nucleotides in the sequence set forth in any one of SEQ ID NOs: 1-1215 and wherein at least one TCF4 allele in the cell comprises a heterozygous SNP at any one of the SNP positions selected from the group consisting of rs71670792, rs1261085, rs1261084, rs11431395, rs373174214, rs35555522, rs66807288, rs141970461, rs71674214, rs8766, rs10221362, rs2276195, rs569385112, rs398041379, rs72925008, rs8090085, rs5825130, rs56887277, rs397836157, rs55755941, rs781691419, rs11409023, rs10221357, rs11661961, rs11660565, rs61656112, rs60565673, rs72925018, rs1261073, rs1261076, rs748718974, rs13381800, rs34773632, rs1942265, rs7241077, rs62092440, rs1893431, rs3838898, rs1893430, 18:55251930_G_GTTTT, rs771385941, rs4800988, rs1942264, rs1261093, rs1539950, rs1539951, rs62092442, rs62092444, rs11662842, rs11664992, rs1261134, rs1261114, rs1788027, rs397858367, rs113662542, rs1261118, rs10701336, rs397809469, rs150323043, rs1038226655, rs149454001, rs796169498, rs9955026, rs1046741326, rs754435392, rs867471715, rs777608256, rs762153709, rs1153636, rs1153637, rs5825134, rs35480166, rs893946, rs374155330, rs781053385, rs899293868, rs996440450, rs1349129287, rs780424692, rs34702622, rs11428164, rs1660235, rs1440473, rs1788026, rs11332509, rs1660237, rs1631486, rs1025804, rs753933037, rs1660233, rs200650987, rs71951255, rs368762262, rs751007744, rs780342991, rs1660241, rs796749696, rs61468075, rs777518462, rs1660242, rs1440476, rs1011392, 18:55374871_T_TA, rs1788030, rs1623427, rs1621581, rs1788025, rs1788023, rs1348047, rs1788019, rs9950000, rs9958125, rs9320010, rs3794891, rs757629087, rs772409228, rs12607679, rs3794889, rs4801149, rs12605773, rs2872041, rs4801150, rs1020169, rs7238888, rs7235757, rs2958178, rs2958165, rs2958171, rs1328839434, rs796792902, rs2958175, rs11309751, rs2958186, rs2919446, rs2958161, rs2860511, rs2958162, rs2919451, rs2919450, rs201657057, rs2958163, rs1440477, rs2958166, rs377458803, rs2958169, rs8098843, rs11412305, rs386387765, 18:55423173_T_TA, rs781071274, rs4374254, rs370693034, rs761981780, rs8084308, rs77540208, rs9320016, rs4524013, rs1025639279, rs4500831, rs7229456, rs12967143, rs12963334, rs12963463, rs398100891, rs12958048, 18:55434419_C_CTTT, rs375388593, rs140134419, rs4801153, rs4801154, rs745460290, rs527450659, rs4341827, rs4468713, rs7228159, rs145330990, rs7231748, rs34577882, rs34578042, rs1452789, rs1452788, rs12606995, rs188225813, rs732779, rs11385247, rs9966430, rs2924321, rs151196106, rs3760600, rs2924328, rs1377243, rs2924329, rs5825142, rs199707137, 18:55468891_C_CCCA, rs11338618, rs149728054, rs11298284, rs7233312, rs2924331, 18:55480276_C_CAA, rs2958182, rs2958183, rs2958184, rs2924332, rs2924333, rs2060889, rs2958187, rs2924335, rs138885827, rs2924336, rs59413482, rs796565215, 18:55496896_C_CAA, rs4801157, rs2958188, rs2958189, rs2060886, rs3017183, rs2958158, rs2924338, rs12956276, rs55812411, rs776881842, rs1452791, rs9957668, rs9954890, rs9964328, rs67387556, rs1491335073, 18:55511330_T_TAAA, rs751932079, rs2957261, 18:55511331_T_TAAAA, rs8090106, rs140221855, rs17089851, rs398032944, rs1341922999, rs624244, rs627685, rs9948513, rs9965067, rs9965195, rs35371867, rs11441646, rs9949107, rs7240986, rs4801158, rs72627231, rs11412432, rs33938531, rs4800990, rs4458089, rs4572488, rs12968271, rs9636107, rs2123389, rs9947814, rs71352207, rs1452787, rs2123392, rs2123393, 18:55559041_T_TA, rs34935191, rs74182105, rs139870092, rs76053687, rs150848781, rs564960433, rs41396445, and rs34232463.

5. (canceled)

6. The method of claim 1, wherein the cell is a corneal cell or a corneal endothelial cell.

7. (canceled)

8. The method of claim 1, wherein the composition is introduced to the cell by a lentivirus-like particle (LVLP).

9. The method of claim 1, wherein the cell is a stem cell, a fibroblast, blood cell, hepatocyte, keratinocyte, any other cell type capable of being reprogrammed to an induced pluripotent stem cell (iPSC), a hematopoietic stem cell (HSC), an induced pluripotent stem cell (iPS cell), an iPSc-derived cell, or an iPSc-derived corneal endothelial cell.

10. (canceled)

11. (canceled)

12. (canceled)

13. (canceled)

14. A composition comprising an RNA molecule having a guide sequence portion that comprises 17-50 nucleotides containing at least 17 contiguous nucleotides in the sequence set forth in any one of SEQ ID NOs: 1-2325, 45057-45092, or 46145-47292.

15. The composition of claim 14, further comprising a second RNA molecule, wherein the first RNA molecule has a guide sequence portion that comprises 17-50 nucleotides containing at least 17 contiguous nucleotides in the sequence set forth in any one of SEQ ID NOs: 1216-2325, and the second RNA molecule has a guide sequence portion that comprises 17-50 nucleotides containing at least 17 contiguous nucleotides in the sequence set forth in any one of SEQ ID NOs: 1-1215.

16. The composition of claim 14, further comprising a CRISPR nuclease.

17. (canceled)

18. A cell modified by the composition of claim 14.

19. The modified cell of claim 18, wherein the cell is a corneal cell or corneal endothelial cell.

20. The modified cell of claim 18, wherein the cell is a stem cell, or a fibroblast, blood cell, hepatocyte, keratinocyte, or any other cell type capable of being reprogrammed to an induced pluripotent stem cell (iPSC), a hematopoietic stem cell (HSC), iPSC-derived cell, or an iPSC-derived corneal endothelial cell.

21. (canceled)

22. (canceled)

23. A method of treating Fuchs Endothelial Corneal Dystrophy (FECD) in a human subject, the method comprising delivering the composition of claim 14 to the subject.

24. (canceled)

25. The method of claim 23, wherein the composition is introduced to the cell by a lentivirus-like particle (LVLP).

26. (canceled)

27. (canceled)

28. Use of the modified cell of claim 18 for treating FECD, comprising delivering the modified cell to a subject having or at risk of having FECD.

29. (canceled)

30. A kit for excising an intronic trinucleotide CTG repeat expansion from a TCF4 allele in a cell, comprising the composition of claim 14 and instructions for delivering the composition to the cell.

31. (canceled)

32. (canceled)

33. (canceled)

34. (canceled)

35. The composition of claim 14, wherein the guide sequence portion of the RNA molecule comprises 17-50 nucleotides containing at least 17 contiguous nucleotides in the sequence set forth in any one of SEQ ID NOs: 178, 238, 308, 405, 830, 907, 973, 1007, 1040, 1053, 1078, 1138, 1141, 1173, 1214-1216, 1436, 1541, 1575, 1940, 1986, 1970, 2007, 2026, 2036, 2039, 2041, 2103, 2144, 2151, 2167, 2170, 2180, 2200, 2212, 2285, or 2319-2325.

36. The composition of claim 15,
i) wherein the guide sequence portion of the first RNA molecule comprises 17-50 nucleotides containing at least 17 contiguous nucleotides in the sequence set forth in SEQ ID: 1216 and the guide sequence portion of the second RNA molecule comprises 17-50 nucleotides containing at least 17 contiguous nucleotides in the sequence set forth in SEQ ID: 238;
ii) wherein the guide sequence portion of the first RNA molecule comprises 17-50 nucleotides containing at least 17 contiguous nucleotides in the sequence set forth in SEQ ID: 1436 and the guide sequence portion of the second RNA molecule comprises 17-50 nucleotides containing at least 17 contiguous nucleotides in the sequence set forth in SEQ ID: 178, 238, or 308;
iii) wherein the guide sequence portion of the first RNA molecule comprises 17-50 nucleotides containing at least 17 contiguous nucleotides in the sequence set forth in SEQ ID: 1541 and the guide sequence portion of the second RNA molecule comprises 17-50 nucleotides containing at least 17 contiguous nucleotides in the sequence set forth in SEQ ID: 178 or 308;
iv) wherein the guide sequence portion of the first RNA molecule comprises 17-50 nucleotides containing at least 17 contiguous nucleotides in the sequence set forth in SEQ ID: 1575 and the guide sequence portion of the second RNA molecule comprises 17-50 nucleotides containing at least 17 contiguous nucleotides in the sequence set forth in SEQ ID: 178, 238, 308, or 405;
v) wherein the guide sequence portion of the first RNA molecule comprises 17-50 nucleotides containing at least 17 contiguous nucleotides in the sequence set forth in SEQ ID: 1970 and the guide sequence portion of the second RNA molecule comprises 17-50 nucleotides containing at least 17 contiguous nucleotides in the sequence set forth in SEQ ID: 1138;
vi) wherein the guide sequence portion of the first RNA molecule comprises 17-50 nucleotides containing at least 17 contiguous nucleotides in the sequence set forth in SEQ ID: 2170 and the guide sequence portion of the second RNA molecule comprises 17-50 nucleotides containing at least 17 contiguous nucleotides in the sequence set forth in SEQ ID: 1053; or
vii) wherein the guide sequence portion of the first RNA molecule comprises 17-50 nucleotides containing at least 17 contiguous nucleotides in the sequence set forth in SEQ ID: 2200 and the guide sequence portion of the second RNA molecule comprises 17-50 nucleotides containing at least 17 contiguous nucleotides in the sequence set forth in SEQ ID: 1078.

37. The composition of claim 36, wherein the composition excises an intronic trinucleotide CTG repeat expansion from a TCF4 allele in a cell without affecting the expression of TCF4.
